(19) United States
(12) Patent Application Publication
(10) Pub. No.: US 2016/0369356 A1
(43) Pub. Date: Dec. 22, 2016

(54) METHODS AND NUCLEIC ACIDS FOR ANALYSES OF CELL PROLIFERATIVE DISORDERS

(71) Applicant: Epigenomics AG, Berlin (DE)

(72) Inventors: Volker Liebenberg, Berlin (DE); Juergen Distler, Berlin (DE); Joern Lewin, Berlin (DE); Fabian Model, Berlin (DE); Reimo Tetzner, Berlin (DE); Rene Cortese, Toronto (CA); Dimo Dietrich, Berlin (DE); Thomas Schlegel, Berlin (DE)

(21) Appl. No.: 15/257,168

(22) Filed: Sep. 6, 2016

Related U.S. Application Data
(63) Continuation of application No. 12/332,703, filed on Dec. 11, 2008.
Application No. 12/332,703 is a continuation-in-part of application No. PCT/EP2008/000384, filed on Jan. 18, 2008.

(30) Foreign Application Priority Data
Jan. 19, 2007 (EP) 07100829.6
Jun. 11, 2007 (EP) 07110019.2
Jul. 30, 2007 (EP) 07113449.8
Dec. 11, 2007 (EP) 07122844.9
Jul. 2, 2008 (EP) 08159537.3

(51) Int. Cl. C12Q 1/68

(52) U.S. Cl. CPC C12Q 1/6886; C12Q 2600/154; C12Q 2600/158; C12Q 2600/16

(57) ABSTRACT

Particular aspects provide methods, nucleic acids and kits for detecting cell proliferative disorders. Preferred aspects provide genomic sequences, the methylation patterns of which have substantial utility for the improved detection of said disorders, providing for improved diagnosis and treatment of same in patients.

### FIELD OF THE INVENTION

[0001] Certain aspects of the invention relate to genomic DNA sequences that exhibit altered expression patterns in disease states relative to normal, and in more particular embodiments to providing methods, nucleic acids, nucleic acid arrays and kits having substantial utility for detecting and/or diagnosing cell proliferative disorders.

### CROSS-REFERENCE TO RELATED APPLICATIONS

[0002] This application is a continuation-in-part of Patent Cooperation Treaty Application Serial No. PCT/EP2008/000384, which claims the benefit of priority to European Patent Application Serial Nos. 07100829.6 filed on Jan. 19, 2007, 07110019.2 filed on Jun. 11, 2007, and 07113449.8 filed on Jul. 30, 2007, and additionally claims the benefit of priority to European Patent Application Serial Nos. 07122844.9, filed on Dec. 11, 2007 and 08159537.3, filed on Jul. 2, 2008, all of which are incorporated herein in their entirety.

### BACKGROUND

[0003] CpG Island Methylation.

[0004] Apart from mutations aberrant methylation of CpG islands has been shown to lead to the transcriptional silencing of certain genes that have been previously linked to the pathogenesis of various cell proliferative disorders, including cancer. CpG islands are short sequences, which are rich in CpG dinucleotides and can usually be found in the 5′ region of approximately 50% of all human genes. Methylation of the cytosines in these islands leads to the loss of gene expression and has been reported in the inactivation of the X chromosome and genomic imprinting.

[0005] Development of Medical Tests.

[0006] Two key evaluative measures of any medical screening or diagnostic test are its sensitivity and specificity, which measure how well the test performs to accurately detect all affected individuals without exception, and without falsely including individuals who do not have the target disease (predicitive value). Historically, many diagnostic tests have been criticized due to poor sensitivity and specificity.

[0007] A true positive (TP) result is where the test is positive and the condition is present. A false positive (FP) result is where the test is positive but the condition is not present. A true negative (TN) result is where the test is negative and the condition is not present. A false negative (FN) result is where the test is negative but the condition is not present. In this context: Sensitivity=TP/(TP+FN); Specificity=TN/(FP+TN); and Predictive value=TP/(TP+FP).

[0008] Sensitivity is a measure of a test's ability to correctly detect the target disease in an individual being tested. A test having poor sensitivity produces a high rate of false negatives, i.e., individuals who have the disease but are falsely identified as being free of that particular disease. The potential danger of a false negative is that the diseased individual will remain undiagnosed and untreated for some period of time, during which the disease may progress to a later stage wherein treatments, if any, may be less effective. An example of a test that has low sensitivity is a protein-based blood test for HIV. This type of test exhibits poor sensitivity because it fails to detect the presence of the virus until the disease is well established and the virus has invaded the bloodstream in substantial numbers. In contrast, an example of a test that has high sensitivity is viral-load detection using the polymerase chain reaction (PCR). High sensitivity is achieved because this type of test can detect very small quantities of the virus. High sensitivity is particularly important when the consequences of missing a diagnosis are high.

[0009] Specificity, on the other hand, is a measure of a test's ability to identify accurately patients who are free of the disease state. A test having poor specificity produces a high rate of false positives, i.e., individuals who are falsely identified as having the disease. A drawback of false positives is that they force patients to undergo unnecessary medical procedures treatments with their attendant risks, emotional and financial stresses, and which could have adverse effects on the patient's health. A feature of diseases that makes it difficult to develop diagnostic tests with high specificity is that disease mechanisms, particularly in cell proliferative disorders, often involve a plurality of genes and proteins. Additionally, certain proteins may be elevated for reasons unrelated to a disease state. Specificity is important when the cost or risk associated with further diagnostic procedures or further medical intervention is very high.

### SUMMARY OF THE INVENTION

[0010] Particular aspects provide a method for detecting or differentiating cell proliferative disorders, preferably those according to Table 2, and most preferably lung carcinomas, in a subject comprising determining the expression levels wherein determining expression levels also includes determining methylation levels and patterns of at least one gene or genomic sequence selected from the group consisting of PTGER4; RUNX1; EVX2; EVX-1; SHOX2; SEQ ID NO: 6; CN027; LRAT; IL-12RB1; TFAP2C; BCL2; ARIDA5A (SEQ ID NO: 12); EN2; PRDM14; SEQ ID NO: 81; ARID5A (SEQ ID NO: 82); VAX1; EN2-2, EN2-3, SHOX2-2, ONECUT1; FOXL-2, TFAP2E and BARHL2 in a biological sample isolated from said subject wherein hyper-methylation and/or under-expression is indicative of the presence of said disorder. Various aspects of the present invention provide an efficient and unique genetic marker, whereby expression analysis of said marker enables the detection of cell proliferative disorders, preferably those according to Table 2 with a particularly high sensitivity, specificity and/or predictive value. Preferred is that the lung cancer is selected from the group consisting of Lung adenocarcinoma; Large cell lung cancer; Squamous cell lung carcinoma and Small cell lung carcinoma.

[0011] In one embodiment the invention provides a method for detecting cell proliferative disorders, preferably those according to Table 2 (most preferably lung carcinoma), in a subject comprising determining the expression levels of at least one gene or genomic sequence selected from the group consisting of PTGER4; RUNX1; EVX2; EVX-1; SHOX2; SEQ ID NO: 6; CN027; LRAT; IL-12RB1; TFAP2C; BCL2; ARIDA5A (SEQ ID NO: 12); EN2; PRDM14; SEQ ID NO: 81; ARID5A (SEQ ID NO: 82); VAX1; EN2-2, EN2-3, SHOX2-2, ONECUT1; FOXL-2, TFAP2E and BARHL2 in a biological sample isolated from said subject wherein under-expression and/or CpG methylation is indicative of the presence of said disorder. In one embodiment said expression level is determined by detecting the presence, absence or level of mRNA transcribed from said gene. In a further embodiment said expression level is determined by detecting the presence, absence or level of a polypeptide encoded by said gene or sequence thereof.

[0012] In a further preferred embodiment said expression is determined by detecting the presence or absence or level of CpG methylation within said gene, wherein under-expression, which is understood as indicated by presence of CpG methylation, or by presence of a certain level of methylation, indicates the presence of cell proliferative disorders, preferably those according to Table 2 (most preferably lung carcinoma).

[0013] Said method comprises the following steps: i) contacting genomic DNA isolated from a biological sample (preferably selected from the group consisting of cells or cell lines, histological slides, biopsies, paraffin-embedded tissue, body fluids, ejaculate, urine, blood plasma, blood serum, whole blood, isolated blood cells, sputum, oral epithelium and biological matter derived from the lung, preferably derived from bronchoscopy (including but not limited to bronchial lavage, bronchial alveolar lavage, bronchial brushing, bronchial abrasion) obtained from the subject, preferably a human subject, with at least one reagent, or series of reagents that distinguishes between methylated and non-methylated CpG dinucleotides within at least one target region of the genomic DNA, wherein the target region is the region which is investigated and wherein the nucleotide sequence of said target region comprises at least one CpG dinucleotide sequence of at least one gene or genomic sequence selected from the group consisting of PTGER4; RUNX1; EVX2; EVX-1; SHOX2; SEQ ID NO: 6; CN027; LRAT; IL-12RB1; TFAP2C; BCL2; ARIDA5A (SEQ ID NO: 12); EN2; PRDM14; SEQ ID NO: 81; ARID5A (SEQ ID NO: 82); VAX1; ONECUT1; FOXL-2, TFAP2E and BARHL2 (including promoter or regulatory elements thereof) and EN2-2, EN2-3 and SHOX2-2 and ii) detecting cell proliferative disorders, preferably those according to Table 2 (most preferably lung carcinoma), at least in part. Preferably the target region is located within a genomic sequences selected from the group mentioned above. It is preferred that the target region comprises, or hybridizes under stringent conditions to a sequence of at least 16 contiguous nucleotides of SEQ ID NO: 1 to SEQ ID NO: 12; SEQ ID NO: 79 to SEQ ID NO: 83; SEQ ID NO: 119 to SEQ ID NO: 125.

[0014] Preferably, the sensitivity of said detection is from about 75% to about 96%, or from about 80% to about 96%, or from about 85% to about 96%. Preferably, the specificity is from about 75% to about 96%, or from about 80% to about 960%, or from about 85% to about 96%.

[0015] Said use of the gene may be enabled by means of any analysis of the expression of the gene, by means of mRNA expression analysis or protein expression analysis. However, in the most preferred embodiment of the invention the detection of cell proliferative disorders, preferably those according to Table 2 (most preferably lung carcinoma), is enabled by means of analysis of the methylation status of at least one gene or genomic sequence selected from the group consisting of PTGER4; RUNX1; EVX2; EVX-1; SHOX2; SEQ ID NO: 6; CN027; LRAT; IL-12RB1; TFAP2C; BCL2; ARIDA5A (SEQ ID NO: 12); EN2; PRDM14; SEQ ID NO: 81; ARID5A (SEQ ID NO: 82); VAX1; ONECUT1; FOXL-2, TFAP2E and BARHL2 (including promoter or regulatory elements thereof) and EN2-2, EN2-3 and SHOX2-2.

[0016] The invention provides a method for the analysis of biological samples for features associated with the development of cell proliferative disorders, preferably those according to Table 2 (most preferably lung carcinoma), the method characterized in that the nucleic acid, or a fragment thereof of SEQ ID NO: 1 to SEQ ID NO: 12; SEQ ID NO: 79 to SEQ ID NO: 83; SEQ ID NO: 119 to SEQ ID NO: 125 is contacted with a reagent or series of reagents capable of distinguishing between methylated and non methylated CpG dinucleotides within the genomic sequence.

[0017] The present invention provides a method for ascertaining epigenetic parameters of genomic DNA associated with the development of cell proliferative disorders, preferably those according to Table 2 (most preferably lung carcinoma). The method has utility for the improved detection and diagnosis of said disease.

[0018] Preferably, the source of the test sample is selected from the group consisting of cells or cell lines, histological slides, biopsies, paraffin-embedded tissue, body fluids, ejaculate, urine, blood plasma, blood serum, whole blood, isolated blood cells, sputum and biological matter (such as body fluids or cells) derived from the oral ephithelium or from the lung, for example as a result of bronchoscopy (including but not limited to bronchial lavage, bronchial alveolar lavage, bronchial brushing, bronchial abrasion) and combinations thereof. More preferably the sample type is selected from the group consisting of blood plasma, sputum, oral epithelium and biological matter derived from the lung, preferably derived from bronchoscopy (including but not limited to bronchial lavage, bronchial alveolar lavage, bronchial brushing, bronchial abrasion) and all possible combinations thereof.

[0019] Specifically, the present invention provides a method for detecting cell proliferative disorders, preferably those according to Table 2 (most preferably lung carcinoma) suitable for use in a diagnostic tool, comprising: obtaining a biological sample comprising genomic nucleic acid(s); contacting the nucleic acid(s), or a fragment thereof, with a reagent or a plurality of reagents sufficient for distinguishing between methylated and non methylated CpG dinucleotide sequences within a target sequence of the subject nucleic acid, wherein the target sequence comprises, or hybridises under stringent conditions to, a sequence comprising at least 16 contiguous nucleotides of SEQ ID NO: 1 to SEQ ID NO: 12; SEQ ID NO: 79 to SEQ ID NO: 83 or SEQ ID NO: 119 to SEQ ID NO: 125 said contiguous nucleotides comprising at least one CpG dinucleotide sequence; and determining, based at least in part on said distinguishing, the methylation state of at least one CpG dinucleotide within said target sequence, or an average, or a value reflecting an average methylation state of a plurality of CpG dinucleotides within said target sequence of the subject nucleic acid, wherein the target sequence comprises, or hybridises under stringent conditions to a sequence comprising at least 16 contiguous nucleotides of SEQ ID NO: 1 to SEQ ID NO: 12; SEQ ID NO: 79 to SEQ ID NO: 83 or SEQ ID NO: 119 to SEQ ID NO: 125 said contiguous nucleotides comprising at least one CpG dinucleotide sequence.

[0020] Preferably, distinguishing between methylated and non methylated CpG dinucleotide sequences within the target sequence comprises methylation state-dependent conversion or non-conversion of at least one such CpG dinucleotide sequence to the corresponding converted or non-converted dinucleotide sequence within a sequence selected from the group consisting of SEQ ID NO: 13 to SEQ ID NO: 60; SEQ ID NO: 84 to SEQ ID NO: 103, SEQ ID NO: 126 to SEQ ID NO: 153, and contiguous regions thereof corresponding to the target sequence.

[0021] Additional embodiments provide a method for the detection of cell proliferative disorders, preferably those according to Table 2 (most preferably lung carcinoma) comprising: obtaining a biological sample having subject genomic DNA; extracting the genomic DNA; treating the genomic DNA, or a fragment thereof, with one or more reagents to convert 5-position unmethylated cytosine bases to uracil or to another base that is detectably dissimilar to cytosine in terms of hybridization properties; contacting the treated genomic DNA, or the treated fragment thereof, with an amplification enzyme and at least two primers comprising, in each case a contiguous sequence at least 9 nucleotides in length that is complementary to, or hybridizes under moderately stringent or stringent conditions to a sequence selected from the group consisting SEQ ID NO: 13 to SEQ ID NO: 60; SEQ ID NO: 84 to SEQ ID NO: 103, SEQ ID NO: 126 to SEQ ID NO: 153, and complements thereof, wherein the treated DNA or the fragment thereof is either amplified to produce an amplificate, or is not amplified; and determining, based on a presence or absence of, or on a property of said amplificate, the methylation state or an average, or a value reflecting an average of the methylation level of at least one, but more preferably a plurality of CpG dinucleotides of SEQ ID NO: 1 to SEQ ID NO: 12; SEQ ID NO: 79 to SEQ ID NO: 83 and SEQ ID NO: 119 to SEQ ID NO: 125.

[0022] Preferably, determining comprises use of at least one method selected from the group consisting of: i) hybridizing at least one nucleic acid molecule comprising a contiguous sequence at least 9 nucleotides in length that is complementary to, or hybridizes under moderately stringent or stringent conditions to a sequence selected from the group consisting of SEQ ID NO: 13 to SEQ ID NO: 60; SEQ ID NO: 84 to SEQ ID NO: 103, SEQ ID NO: 126 to SEQ ID NO: 153, and complements thereof; ii) hybridizing at least one nucleic acid molecule, bound to a solid phase, comprising a contiguous sequence at least 9 nucleotides in length that is complementary to, or hybridizes under moderately stringent or stringent conditions to a sequence selected from the group consisting of SEQ ID NO: 13 to SEQ ID NO: 60; SEQ ID NO: 84 to SEQ ID NO: 103, SEQ ID NO: 126 to SEQ ID NO: 153 and complements thereof; iii) hybridizing at least one nucleic acid molecule comprising a contiguous sequence at least 9 nucleotides in length that is complementary to, or hybridizes under moderately stringent or stringent conditions to a sequence selected from the group consisting of SEQ ID NO: 13 to SEQ ID NO: 60; SEQ ID NO: 84 to SEQ ID NO: 103, SEQ ID NO: 126 to SEQ ID NO: 153, and complements thereof, and extending at least one such hybridized nucleic acid molecule by at least one nucleotide base; and iv) sequencing of the amplificate.

[0023] Further embodiments provide a method for the analysis (i.e. detection or diagnosis) of cell proliferative disorders, preferably those according to Table 2 (most preferably lung carcinoma), comprising: obtaining a biological sample having subject genomic DNA; extracting the genomic DNA; contacting the genomic DNA, or a fragment thereof, comprising one or more sequences selected from the group consisting of SEQ ID NO: 1 to SEQ ID NO: 12; SEQ ID NO: 79 to SEQ ID NO: 83 and SEQ ID NO: 119 to SEQ ID NO: 125 or a sequence that hybridizes under stringent conditions thereto, with one or more methylation-sensitive restriction enzymes, wherein the genomic DNA is either digested thereby to produce digestion fragments, or is not digested thereby; and determining, based on a presence or absence of, or on property of at least one such fragment, the methylation state of at least one CpG dinucleotide sequence of SEQ ID NO: 1 to SEQ ID NO: 12; SEQ ID NO: 79 to SEQ ID NO: 83 and SEQ ID NO: 119 to SEQ ID NO: 125 or an average, or a value reflecting an average methylation state of a plurality of CpG dinucleotide sequences thereof. Preferably, the digested or undigested genomic DNA is amplified prior to said determining.

[0024] Additional embodiments provide novel genomic and chemically modified nucleic acid sequences, as well as oligonucleotides and/or PNA-oligomers for analysis of cytosine methylation patterns within SEQ ID NO: 1 to SEQ ID NO: 12; SEQ ID NO: 79 to SEQ ID NO: 83 and SEQ ID NO: 119 to SEQ ID NO: 125.

[0025] Additional embodiments provide novel analytical assays, as well as specific favourable combinations of primers and blockers or primers and probes, resulting in especially well performing diagnostic or analytical tests.

### BRIEF SUMMARY OF THE DRAWINGS

[0026] No drawings are deemed necessary in view of the sufficiency of the disclosure provided herein.

### DETAILED DESCRIPTION OF THE INVENTION

### Definitions

[0027] The term “Observed/Expected Ratio” (“O/E Ratio”) refers to the frequency of CpG dinucleotides within a particular DNA sequence, and corresponds to the [number of CpG sites/(number of C bases×number of G bases)]/band length for each fragment.

[0028] The term “CpG island” refers to a contiguous region of genomic DNA that satisfies the criteria of (1) having a frequency of CpG dinucleotides corresponding to an “Observed/Expected Ratio” >0.6, and (2) having a “GC Content” >0.5. CpG islands are typically, but not always, between about 0.2 to about 1 KB, or to about 2 kb in length.

[0029] The term “methylation state” or “methylation status” refers to the presence or absence of 5-methylcytosine (“5-mCyt”) at one or a plurality of CpG dinucleotides within a DNA sequence. Methylation states at one or more particular CpG methylation sites (each having two CpG dinucleotide sequences) within a DNA sequence include “unmethylated,” “fully-methylated” and “hemi-methylated.”

[0030] The term “hemi-methylation” or “hemimethylation” refers to the methylation state of a double stranded DNA wherein only one strand thereof is methylated.

[0031] The term ‘AUC’ as used herein is an abbreviation for the area under a curve. In particular it refers to the area under a Receiver Operating Characteristic (ROC) curve. The ROC curve is a plot of the true positive rate against the false positive rate for the different possible cut points of a diagnostic test. It shows the trade-off between sensitivity and specificity depending on the selected cut point (any increase in sensitivity will be accompanied by a decrease in specificity). The area under an ROC curve (AUC) is a measure for the accuracy of a diagnostic test (the larger the area the better, optimum is 1, a random test would have a ROC curve lying on the diagonal with an area of 0.5; for reference: J. P. Egan. Signal Detection Theory and ROC Analysis, Academic Press, New York, 1975).

[0032] The term “microarray” refers broadly to both “DNA microarrays,” and ‘DNA chip(s),’ as recognized in the art, encompasses all art-recognized solid supports, and encompasses all methods for affixing nucleic acid molecules thereto or synthesis of nucleic acids thereon.

[0033] “Genetic parameters” are mutations and polymorphisms of genes and sequences further required for their regulation. To be designated as mutations are, in particular, insertions, deletions, point mutations, inversions and polymorphisms and, particularly preferred, SNPs (single nucleotide polymorphisms).

[0034] “Epigenetic parameters” are, in particular, cytosine methylation. Further epigenetic parameters include, for example, the acetylation of histones which, however, cannot be directly analysed using the described method but which, in turn, correlate with the DNA methylation.

[0035] The term “bisulfite reagent” refers to a reagent comprising bisulfite, disulfite, hydrogen sulfite or combinations thereof, useful as disclosed herein to distinguish between methylated and unmethylated CpG dinucleotide sequences.

[0036] The term “Methylation assay” refers to any assay for determining the methylation state or methylation level of one or more CpG dinucleotide sequences within a sequence of DNA.

[0037] The term “MS.AP-PCR” (Methylation-Sensitive Arbitrarily-Primed Polymerase Chain Reaction) refers to the art-recognized technology that allows for a global scan of the genome using CG-rich primers to focus on the regions most likely to contain CpG dinucleotides, and described by Gonzalgo et al., Cancer Research 57:594-599, 1997.

[0038] The term “MethyLight™” refers to the art-recognized fluorescence-based real-time PCR technique described by Eads et al., Cancer Res. 59:2302-2306, 1999.

[0039] The term “HeavyMethyl™” assay, in the embodiment thereof implemented herein, refers to an assay, wherein methylation specific blocking probes (also referred to herein as blockers) covering CpG positions between, or covered by the amplification primers enable methylation-specific selective amplification of a nucleic acid sample.

[0040] The term “HeavyMethyl™ MethyLight™” assay, in the embodiment thereof implemented herein, refers to a HeavyMethyl™ MethyLight™ assay, which is a variation of the MethyLight™ assay, wherein the MethyLight™ assay is combined with methylation specific blocking probes covering CpG positions between the amplification primers.

[0041] The term “Ms-SNuPE” (Methylation-sensitive Single Nucleotide Primer Extension) refers to the art-recognized assay described by Gonzalgo & Jones, Nucleic Acids Res. 25:2529-2531, 1997.

[0042] The term “MSP” (Methylation-specific PCR) refers to the art-recognized methylation assay described by Herman et al. Proc. Natl. Acad. Sci. USA 93:9821-9826, 1996, and by U.S. Pat. No. 5,786,146.

[0043] The term “COBRA” (Combined Bisulfite Restriction Analysis) refers to the art-recognized methylation assay described by Xiong & Laird, Nucleic Acids Res. 25:2532-2534, 1997.

[0044] The term “MCA” (Methylated CpG Island Amplification) refers to the methylation assay described by Toyota et al., Cancer Res. 59:2307-12, 1999, and in WO 00/26401A1.

[0045] The term “hybridisation” is to be understood as a bond of an oligonucleotide to a complementary sequence along the lines of the Watson-Crick base pairings in the sample DNA, forming a duplex structure.

[0046] “Stringent hybridisation conditions,” as defined herein, involve hybridising at 68° C. in 5×SSC/5×Denhardt's solution/1.0% SDS, and washing in 0.2×SSC/0.1% SDS at room temperature, or involve the art-recognized equivalent thereof (e.g., conditions in which a hybridisation is carried out at 60° C. in 2.5×SSC buffer, followed by several washing steps at 37° C. in a low buffer concentration, and remains stable). Moderately stringent conditions, as defined herein, involve including washing in 3×SSC at 42° C., or the art-recognized equivalent thereof. The parameters of salt concentration and temperature can be varied to achieve the optimal level of identity between the probe and the target nucleic acid. Guidance regarding such conditions is available in the art, for example, by Sambrook et al., 1989, Molecular Cloning, A Laboratory Manual, Cold Spring Harbor Press, N.Y.; and Ausubel et al. (eds.), 1995, Current Protocols in Molecular Biology, (John Wiley & Sons, N.Y.) at Unit 2.10.

[0047] The terms “Methylation-specific restriction enzymes” or “methylation-sensitive restriction enzymes” shall be taken to mean an enzyme that selectively digests a nucleic acid depending on the methylation state of its recognition site. In such cases, restriction enzymes, specific for digesting either unmethylated or hemimethylated sites, will either not cut or cut with significantly reduced efficiency the methylated recognition site. In the case of such restriction enzymes which specifically cut if the recognition site is methylated, the cut will not take place, or with a significantly reduced efficiency if the recognition site is not methylated. Preferred are methylation-specific restriction enzymes, the recognition sequence of which contains a CG dinucleotide (for instance cgcg or cccggg). Further preferred for some embodiments are restriction enzymes that do not cut if the cytosine in this dinucleotide is methylated at the carbon atom C5.

[0048] “Non-methylation-specific restriction enzymes” or “non-methylation-sensitive restriction enzymes” are restriction enzymes that cut a nucleic acid sequence irrespective of the methylation state with nearly identical efficiency. They are also called “methylation-unspecific restriction enzymes.”

[0049] The term “at least one gene or genomic sequence selected from the group consisting of PTGER4; RUNX1; EVX2; EVX-1; SHOX2; SEQ ID NO: 6; CN027; LRAT; IL-12RB1; TFAP2C; BCL2; ARIDA5A (SEQ ID NO: 12); EN2; PRDM14; SEQ ID NO: 81; ARID5A (SEQ ID NO: 82); VAX1; ONECUT1; FOXL-2, TFAP2E and BARHL2; EN2-2, EN2-3 and SHOX2-2 shall be taken to include any transcript variant thereof. Furthermore as a plurality of SNPs are known within said genes the term shall be taken to include all sequence variants thereof.

[0050] The sample types which may be analysed with any of the methods according to the invention may be any from the group comprising cells or cell lines, histological slides, biopsies, paraffin-embedded tissue, body fluids, ejaculate, urine, blood plasma, blood serum, whole blood, isolated blood cells, sputum and biological matter (such as body fluids or cells) derived from the oral ephithelium or from the lung, for example as a result of bronchoscopy (including but not limited to bronchial lavage, bronchial alveolar lavage, bronchial brushing, bronchial abrasion, and combinations thereof. More preferably the sample type is selected from the group consisting of blood plasma, sputum and biological matter (such as body fluids or cells) derived from the oral ephithelium or from the lung, for example as a result of bronchoscopy (including but not limited to bronchial lavage, bronchial alveolar lavage, bronchial brushing, bronchial abrasion) and all possible combinations thereof.

[0051] The sample types, which may be analysed with any of the methods according to the invention preferably, belong to the group of fluids, which are derived from the bloodstream.

[0052] The sample types, which may be analysed with any of the methods according to the invention also preferably, belong to the group of biological samples derived from the lung or the oral epithelium. The term “biological samples derived from the lung” shall comprise fluids and/or cells obtained from the bronchial system of the lung. Such biological samples derived from the lung may be taken from a subject (e.g. a patient) without adding an external fluid, in which case typical sample types are sputum, tracheal or bronchial fluid, exhaled fluid, brushings or biopsies. Such fluids from the bronchial system however may also be taken after adding or rinsing with external fluid, in which case the typical sample would be e.g. induced sputum, bronchial lavage or bronchoalveolar lavage. Such biological samples derived from the lung may be taken by use of instruments (suction catheters, bronchoscope, brushes, forceps, Water absorbing trap) or without using instruments. The method may also be employed to analyse DNA already obtained from any such material.

[0053] The bronchial system (also called “airways”) is to be understood as the system of organs involved in the intake and exchange of air (especially oxygen and carbon dioxide) between an organism and the environment, e.g. trachea, bronchi, bronchioles, alveolar duct, alveoli).

[0054] The terms Bronchial lavage (BL) or Bronchoalveolar lavage (BAL) are to be understood as the types of fluids which are collected when the according medical procedures BL and BAL have been performed. BL and BAL are medical procedures in which a bronchoscope is passed through the mouth or nose into the lungs and fluid is squirted into a small part of the lung and then recollected for examination. BL/BAL is typically performed to diagnose lung disease. In particular, BAL is commonly used to diagnose infections in people with immune system problems, pneumonia in people on ventilators, some types of lung cancer, and scarring of the lung (interstitial lung disease). BAL is the most common manner to sample the components of the epithelial lining fluid (ELF) and to determine the protein composition of the pulmonary airways, and it is often used in immunological research as a means of sampling cells or pathogen levels in the lung. Examples of these include T-cell populations and influenza viral levels.

[0055] BL and BAL differ in the area (segment) of the bronchial system rinsed and the amount of fluid used:
[0056] BL focuses on the bronchi using approximately 10 ml of fluid
[0057] BAL reaches further towards bronchioli and alveolar ducts using a higher amount of fluid (about 100 ml)

[0058] The term Bronchoscopy is understood to comprise a medical test to view the airways and diagnose lung disease. It may also be used during the treatment of some lung conditions.

[0059] Biological samples derived from the lung may also be achieved with a suction catheter for the trachea and the bronchial system, for example tubular, flexible suction catheter may be used for insertion into the trachea and the bronchial system, containing at least one continuous lumen for suction of fluids from the lungs.

[0060] The term lung carcinoma shall be taken to comprise lung adenocarcinoma; large cell lung cancer; squamous cell lung carcinoma and small cell lung carcinoma, as well as other forms of rare carcinoma types, which may be identified in a tumor which is located in the lung, whenever the specification refers to detection of lung carcinoma or diagnosis of lung carcinoma.

[0061] The term “methylation” is meant to be understood as cytosine methylation or CpG methylation. These terms are used to describe methylation at the C5 atom of the cytosine within a CpG context.

### Overview:

[0062] The present invention provides a method for detecting cell proliferative disorders, preferably those according to Table 2 (most preferably lung carcinoma) in a subject comprising determining the expression or methylation levels of at least one gene or genomic sequence selected from the group consisting of PTGER4; RUNX1; EVX2; EVX-1; SHOX2; SEQ ID NO: 6; CN027; LRAT; IL-12RB1; TFAP2C; BCL2; ARIDA5A (SEQ ID NO: 12); EN2; PRDM14; SEQ ID NO: 81; ARID5A (SEQ ID NO: 82); VAX1; ONECUT1; FOXL-2, TFAP2E and BARHL2 (including promoter or regulatory elements thereof) and EN2-2, EN2-3 and SHOX2-2 in a biological sample isolated from said subject wherein hyper-methylation and/or under-expression is indicative of the presence of said disorder. Said markers may be used for the diagnosis of cell proliferative disorders, preferably those according to Table 2 (most preferably lung carcinoma).

[0063] Bisulfite Modification of DNA is an Art-Recognized Tool Used to Assess CpG Methylation Status.

[0064] 5-methylcytosine is the most frequent covalent base modification in the DNA of eukaryotic cells. It plays a role, for example, in the regulation of the transcription, in genetic imprinting, and in tumorigenesis. Therefore, the identification of 5-methylcytosine as a component of genetic information is of considerable interest. However, 5-methylcytosine positions cannot be identified by sequencing, because 5-methylcytosine has the same base pairing behavior as cytosine. Moreover, the epigenetic information carried by 5-methylcytosine is completely lost during, e.g., PCR amplification.

[0065] The most frequently used method for analyzing DNA for the presence of 5-methylcytosine is based upon the specific reaction of bisulfite with cytosine whereby, upon subsequent alkaline hydrolysis, cytosine is converted to uracil which corresponds to thymine in its base pairing behavior. Significantly, however, 5-methylcytosine remains unmodified under these conditions. Consequently, the original DNA is converted in such a manner that methylcytosine, which originally could not be distinguished from cytosine by its hybridization behavior, can now be detected as the only remaining cytosine using standard, art-recognized molecular biological techniques, for example, by amplification and hybridization, or by sequencing. All of these techniques are based on differential base pairing properties, which can now be fully exploited.

[0066] The prior art, in terms of sensitivity, is defined by a method comprising enclosing the DNA to be analysed in an agarose matrix, thereby preventing the diffusion and renaturation of the DNA (bisulfite only reacts with single-stranded DNA), and replacing all precipitation and purification steps with fast dialysis (Olek A, et al., A modified and improved method for bisulfite based cytosine methylation analysis, Nucleic Acids Res. 24:5064-6, 1996). It is thus possible to analyse individual cells for methylation status, illustrating the utility and sensitivity of the method. An overview of art-recognized methods for detecting 5-methylcytosine is provided by Rein, T., et al., Nucleic Acids Res., 26:2255, 1998.

[0067] The bisulfite technique, barring few exceptions (e.g., Zeschnigk M, et al., Eur J Hum Genet. 5:94-98, 1997), is currently only used in research. In all instances, short, specific fragments of a known gene are amplified subsequent to a bisulfite treatment, and either completely sequenced (Olek & Walter, Nat Genet. 1997 17:275-6, 1997), subjected to one or more primer extension reactions (Gonzalgo & Jones, Nucleic Acids Res., 25:2529-31, 1997; WO 95/00669; U.S. Pat. No. 6,251,594) to analyse individual cytosine positions, or treated by enzymatic digestion (Xiong & Laird, Nucleic Acids Res., 25:2532-4, 1997). Detection by hybridisation has also been described in the art (Olek et al., WO 99/28498). Additionally, use of the bisulfite technique for methylation detection with respect to individual genes has been described (Grigg & Clark, Bioessays, 16:431-6, 1994; Zeschnigk M, et al., Hum Mol Genet., 6:387-95, 1997; Feil R, et al., Nucleic Acids Res., 22:695-, 1994; Martin V, et al., Gene, 157:261-4, 1995; WO 9746705 and WO 9515373).

[0068] The present invention provides for the use of the bisulfite technique, in combination with one or more methylation assays, for determination of the methylation status of CpG dinucleotide sequences within SEQ ID NO: 1 to SEQ ID NO: 12; SEQ ID NO: 79 to SEQ ID NO: 83 and SEQ ID NO: 119 to SEQ ID NO: 125. Genomic CpG dinucleotides can be methylated or unmethylated (alternatively known as up- and down-methylated respectively). However the methods of the present invention are suitable for the analysis of biological samples of a heterogeneous nature e.g. a low concentration of tumor cells within a background of body fluid analyte, such as for example biological samples derived from the lung, such as sputum or bronchial lavage or bronchoalveolar lavage. Accordingly, when analyzing the methylation status of a CpG position within such a sample the person skilled in the art may use a quantitative assay for determining the level (e.g. percent, fraction, ratio, proportion or degree) of methylation at a particular CpG position as opposed to a methylation state. Accordingly the term methylation status or methylation state should also be taken to mean a value reflecting the degree of methylation at a CpG position, in other words the methylation level. Unless specifically stated the terms “hypermethylated” or “upmethylated” shall be taken to mean a methylation level above that of a specified cut-off point, wherein said cut-off may be a value representing the average or median methylation level for a given population, or is preferably an optimized cut-off level. The “cut-off” is also referred herein as a “threshold”. In the context of the present invention the terms “methylated”, “hypermethylated” or “upmethylated” shall be taken to include a methylation level above the cut-off be zero (0) % (or equivalents thereof) methylation for all CpG positions within and associated with (e.g. in promoter or regulatory regions) at least one gene or genomic sequence selected from the group consisting of PTGER4; RUNX1; EVX2; EVX-1; SHOX2; SEQ ID NO: 6; CN027; LRAT; IL-12RB1; TFAP2C; BCL2; ARIDA5A (SEQ ID NO: 12); EN2; PRDM14; SEQ ID NO: 81; ARID5A (SEQ ID NO: 82); VAX1; ONECUT1; FOXL-2, TFAP2E and BARHL2 (including promoter or regulatory elements thereof) and EN2-2, EN2-3 and SHOX2-2.

[0069] According to the present invention, determination of the methylation status of CpG dinucleotide sequences within SEQ ID NO: 1 to SEQ ID NO: 12; SEQ ID NO: 79 to SEQ ID NO: 83 and SEQ ID NO: 119 to SEQ ID NO: 125 have utility in the diagnosis and detection of cell proliferative disorders, preferably those according to Table 2 (most preferably lung carcinoma).

[0070] Methylation Assay Procedures.

[0071] Various methylation assay procedures are known in the art, and can be used in conjunction with the present invention. These assays allow for determination of the methylation state of one or a plurality of CpG dinucleotides (e.g., CpG islands) within a DNA sequence. Such assays involve, among other techniques, DNA sequencing of bisulfite-treated DNA, PCR (for sequence-specific amplification), Southern blot analysis, and use of methylation-sensitive restriction enzymes.

[0072] For example, genomic sequencing has been simplified for analysis of DNA methylation patterns and 5-methylcytosine distribution by using bisulfite treatment (Frommer et al., Proc. Natl. Acad. Sci. USA 89:1827-1831, 1992). Additionally, restriction enzyme digestion of PCR products amplified from bisulfite-converted DNA is used, e.g., the method described by Sadri & Hornsby (Nucl. Acids Res. 24:5058-5059, 1996), or COBRA (Combined Bisulfite Restriction Analysis) (Xiong & Laird, Nucleic Acids Res. 25:2532-2534, 1997).

[0073] COBRA.

[0074] COBRA™ analysis is a quantitative methylation assay useful for determining DNA methylation levels at specific gene loci in small amounts of genomic DNA (Xiong & Laird, Nucleic Acids Res. 25:2532-2534, 1997). Briefly, restriction enzyme digestion is used to reveal methylation-dependent sequence differences in PCR products of sodium bisulfite-treated DNA. Methylation-dependent sequence differences are first introduced into the genomic DNA by standard bisulfite treatment according to the procedure described by Frommer et al. (Proc. Natl. Acad. Sci. USA 89:1827-1831, 1992). PCR amplification of the bisulfite converted DNA is then performed using primers specific for the CpG islands of interest, followed by restriction endonuclease digestion, gel electrophoresis, and detection using specific, labeled hybridization probes. Methylation levels in the original DNA sample are represented by the relative amounts of digested and undigested PCR product in a linearly quantitative fashion across a wide spectrum of DNA methylation levels. In addition, this technique can be reliably applied to DNA obtained from microdissected paraffin-embedded tissue samples.

[0075] Typical reagents (e.g., as might be found in a typical COBRA™-based kit) for COBRA™ analysis may include, but are not limited to: PCR primers for specific gene (or bisulfite treated DNA sequence or CpG island); restriction enzyme and appropriate buffer; gene-hybridization oligonucleotide; control hybridization oligonucleotide; kinase labeling kit for oligonucleotide probe; and labeled nucleotides. Additionally, bisulfite conversion reagents may include: DNA denaturation buffer; sulfonation buffer; DNA recovery reagents or kits (e.g., precipitation, ultrafiltration, affinity column); desulfonation buffer; and DNA recovery components.

[0076] Preferably, assays such as “MethyLight™” (a fluorescence-based real-time PCR technique) (Eads et al., cell proliferative disorders, preferably those according to Cancer Res. 59:2302-2306, 1999), Ms-SNuPE™ (Methylation-sensitive Single Nucleotide Primer Extension) reactions (Gonzalgo & Jones, Nucleic Acids Res. 25:2529-2531, 1997), methylation-specific PCR (“MSP”; Herman et al., Proc. Natl. Acad. Sci. USA 93:9821-9826, 1996; U.S. Pat. No. 5,786,146), and methylated CpG island amplification (“MCA”; Toyota et al., cell proliferative disorders, preferably those according to Cancer Res. 59:2307-12, 1999) are used alone or in combination with other of these methods.

[0077] The “HeavyMethyl™” assay, technique is a quantitative method for assessing methylation differences based on methylation specific amplification of bisulfite treated DNA. Methylation specific blocking probes (also referred to herein as blockers) covering CpG positions between, or covered by the amplification primers enable methylation-specific selective amplification of a nucleic acid sample.

[0078] The term “HeavyMethyl™ MethyLight™” assay, in the embodiment thereof implemented herein, refers to a HeavyMethyl™ MethyLight™ assay, which is a variation of the MethyLight™ assay, wherein the MethyLight™ assay is combined with methylation specific blocking probes covering CpG positions between the amplification primers. The HeavyMethyl™ assay may also be used in combination with methylation specific amplification primers.

[0079] Typical reagents (e.g., as might be found in a typical MethyLig [symbol] t□-based kit) for HeavyMethyl™ analysis may include, but are not limited to: PCR primers for specific genes (or bisulfite treated DNA sequence or CpG island); blocking oligonucleotides; optimized PCR buffers and deoxynucleotides; and Taq polymerase.

[0080] MSP.

[0081] MSP (methylation-specific PCR) allows for assessing the methylation status of virtually any group of CpG sites within a CpG island, independent of the use of methylation-sensitive restriction enzymes (Herman et al. Proc. Natl. Acad. Sci. USA 93:9821-9826, 1996; U.S. Pat. No. 5,786,146). Briefly, DNA is modified by sodium bisulfite converting all unmethylated, but not methylated cytosines to uracil, and subsequently amplified with primers specific for methylated versus unmethylated DNA. MSP requires only small quantities of DNA, is sensitive to 0.1% methylated alleles of a given CpG island locus, and can be performed on DNA extracted from paraffin-embedded samples. Typical reagents (e.g., as might be found in a typical MSP-based kit) for MSP analysis may include, but are not limited to: methylation-specific and unmethylation-specific PCR primers for specific gene(s) (or bisulfite treated DNA sequence or CpG island), optimized PCR buffers and deoxynucleotides, and specific probes.

[0082] MethyLig [symbol] t™.

[0083] The MethyLig [symbol] t™ assay is a high-throughput quantitative methylation assay that utilizes fluorescence-based real-time PCR (TaqMa [symbol] □) technology that requires no further manipulations after the PCR step (Eads et al., Cancer Res. 59:2302-2306, 1999). Briefly, the MethyLight™ process begins with a mixed sample of genomic DNA that is converted, in a sodium bisulfite reaction, to a mixed pool of methylation-dependent sequence differences according to standard procedures (the bisulfite process converts unmethylated cytosine residues to uracil). Fluorescence-based PCR is then performed in a “biased” (with PCR primers that overlap known CpG dinucleotides) reaction. Sequence discrimination can occur both at the level of the amplification process and at the level of the fluorescence detection process.

[0084] The MethyLig [symbol] t™ assay may be used as a quantitative test for methylation patterns in the genomic DNA sample, wherein sequence discrimination occurs at the level of probe hybridization. In this quantitative version, the PCR reaction provides for a methylation specific amplification in the presence of a fluorescent probe that overlaps a particular putative methylation site. An unbiased control for the amount of input DNA is provided by a reaction in which neither the primers, nor the probe overlie any CpG dinucleotides. Alternatively, a qualitative test for genomic methylation is achieved by probing of the biased PCR pool with either control oligonucleotides that do not “cover” known methylation sites (a fluorescence-based version of the HeavyMethyl™ and MSP techniques), or with oligonucleotides covering potential methylation sites.

[0085] The MethyLig [symbol] t™ process can by used with any suitable probes e.g. “TaqMan®”, Lightcycler® etc. . . . . For example, double-stranded genomic DNA is treated with sodium bisulfite and subjected to one of two sets of PCR reactions using TaqMan® probes; e.g., with MSP primers and/or HeavyMethyl blocker oligonucleotides and TaqMan® probe. The TaqMan® probe is dual-labeled with fluorescent “reporter” and “quencher” molecules, and is designed to be specific for a relatively high GC content region so that it melts out at about 10° C. higher temperature in the PCR cycle than the forward or reverse primers. This allows the TaqMan® probe to remain fully hybridized during the PCR annealing/extension step. As the Taq polymerase enzymatically synthesizes a new strand during PCR, it will eventually reach the annealed TaqMan® probe. The Taq polymerase 5′ to 3′ endonuclease activity will then displace the TaqMan® probe by digesting it to release the fluorescent reporter molecule for quantitative detection of its now unquenched signal using a real-time fluorescent detection system.

[0086] Typical reagents (e.g., as might be found in a typical MethyLigbt-based kit) for MethyLig [symbol] t™ analysis may include, but are not limited to: PCR primers for specific gene (or bisulfite treated DNA sequence or CpG island); TaqMan® or Lightcycler® probes; optimized PCR buffers and deoxynucleotides; and Taq polymerase.

[0087] TSP Method.

[0088] The method was performed as described in the application EP 08159227.1 (see p 29-28, under Examples). In brief, the DNA restriction enzyme Tsp5091 is used instead of the blocking oligonucleotides. This enzyme specifically cuts unmethylated DNA during amplicfication after bisulfite-treatment. As a result, unmethylated DNA is prevented from being amplified.

[0089] The Q [symbol] ™ (quantitative methylation) assay is an alternative quantitative test for methylation patterns in genomic DNA samples, wherein sequence discrimination occurs at the level of probe hybridization. In this quantitative version, the PCR reaction provides for unbiased amplification in the presence of a fluorescent probe that overlaps a particular putative methylation site. An unbiased control for the amount of input DNA is provided by a reaction in which neither the primers, nor the probe overlie any CpG dinucleotides. Alternatively, a qualitative test for genomic methylation is achieved by probing of the biased PCR pool with either control oligonucleotides that do not “cover” known methylation sites (a fluorescence-based version of the HeavyMethyl™ and MSP techniques), or with oligonucleotides covering potential methylation sites.

[0090] The Q [symbol] ™ process can by used with any suitable probes e.g. “TaqMan®”, Lightcycler®, Scorpion® probes etc. in the amplification process. For example, double-stranded genomic DNA is treated with sodium bisulfite and subjected to unbiased primers and the TaqMan® probe. The TaqMan® probe is dual-labeled with fluorescent “reporter” and “quencher” molecules, and is designed to be specific for a relatively high GC content region so that it melts out at about 10° C. higher temperature in the PCR cycle than the forward or reverse primers. This allows the TaqMan® probe to remain fully hybridized during the PCR annealing/extension step. As the Taq polymerase enzymatically synthesizes a new strand during PCR, it will eventually reach the annealed TaqMan® probe. The Taq polymerase 5′ to 3′ endonuclease activity will then displace the TaqMan® probe by digesting it to release the fluorescent reporter molecule for quantitative detection of its now unquenched signal using a real-time fluorescent detection system.

[0091] The Scorpion technique (generally described in patent application EP 9812768.1 has been adapted for the analysis of CpG methylation as described in detail within the published US application US 2006-0194208, which is incorporated by reference herein for this purpose.

[0092] Typical reagents (e.g., as might be found in a typical Q [symbol] ™-based kit) for Q [symbol] ™ analysis may include, but are not limited to: PCR primers for specific gene (or bisulfite treated DNA sequence or CpG island); TaqMan® or Lightcycler® probes; optimized PCR buffers and deoxynucleotides; and Taq polymerase.

[0093] Ms-SNuPE.

[0094] The Ms-SNuPE™ technique is a quantitative method for assessing methylation differences at specific CpG sites based on bisulfite treatment of DNA, followed by single-nucleotide primer extension (Gonzalgo & Jones, Nucleic Acids Res. 25:2529-2531, 1997). Briefly, genomic DNA is reacted with sodium bisulfite to convert unmethylated cytosine to uracil while leaving 5-methylcytosine unchanged. Amplification of the desired target sequence is then performed using PCR primers specific for bisulfite-converted DNA, and the resulting product is isolated and used as a template for methylation analysis at the CpG site(s) of interest. Small amounts of DNA can be analyzed (e.g., microdissected pathology sections), and it avoids utilization of restriction enzymes for determining the methylation status at CpG sites.

[0095] Typical reagents (e.g., as might be found in a typical Ms-SNuPE™-based kit) for Ms-SNuPE™ analysis may include, but are not limited to: PCR primers for specific gene (or bisulfite treated DNA sequence or CpG island); optimized PCR buffers and deoxynucleotides; gel extraction kit; positive control primers; Ms-SNuPE™ primers for specific gene; reaction buffer (for the Ms-SNuPE reaction); and labelled nucleotides. Additionally, bisulfite conversion reagents may include: DNA denaturation buffer; sulfonation buffer; DNA recovery regents or kit (e.g., precipitation, ultrafiltration, affinity column); desulfonation buffer; and DNA recovery components.

[0096] The genomic sequence(s) according to SEQ ID NO: 1 to SEQ ID NO: 12; SEQ ID NO: 79 to SEQ ID NO: 83 AND SEQ ID NO: 119 TO SEQ ID NO: 125, and non-naturally occurring treated variants thereof according to SEQ ID NO: 13 to SEQ ID NO: 60; SEQ ID NO: 84 to SEQ ID NO: 103, SEQ ID NO: 126 TO SEQ ID NO: 153, were determined to have novel utility for the detection of cell proliferative disorders, preferably those according to Table 2 (most preferably lung carcinoma). This utility has been exemplified in the specific assays described within the specification, especially in the examples.

[0097] In one embodiment the method of the invention comprises the following steps: i) determining the expression of at least one gene or genomic sequence selected from the group consisting of PTGER4; RUNX1; EVX2; EVX-1; SHOX2; SEQ ID NO: 6; CN027; LRAT; IL-12RB1; TFAP2C; BCL2; ARIDA5A (SEQ ID NO: 12); EN2; PRDM14; SEQ ID NO: 81; ARID5A (SEQ ID NO: 82); VAX1; ONECUT1; FOXL-2, TFAP2E and BARHL2 and ii) determining the presence or absence of a subject's risk or increased risk of suffering from a cell proliferative disorder, or detecting a cell proliferative disorder preferably those according to Table 2 (most preferably lung carcinoma). Preferred is the detection of a lung cancer selected from the group consisting of lung adenocarcinoma; large cell lung cancer; squamous cell lung carcinoma and small cell lung carcinoma.

[0098] Certain aspects of the method of the invention may be enabled by means of any analysis of the expression of an RNA transcribed therefrom or polypeptide or protein translated from said RNA, preferably by means of mRNA expression analysis or polypeptide expression analysis. However, in the most preferred embodiment of the invention the detection of cell proliferative disorders, preferably those according to Table 2 (most preferably lung carcinoma), is enabled by means of analysis of the methylation status or methylation level of at least one gene or genomic sequence selected from the group consisting of PTGER4; RUNX1; EVX2; EVX-1; SHOX2; SEQ ID NO: 6; CN027; LRAT; IL-12RB1; TFAP2C; BCL2; ARIDA5A (SEQ ID NO: 12); EN2; PRDM14; SEQ ID NO: 81; ARID5A (SEQ ID NO: 82); VAX1; ONECUT1; FOXL-2, TFAP2E and BARHL2 (including promoter or regulatory elements thereof) and EN2-2, EN2-3 and SHOX2-2.

[0099] Accordingly, particular aspects of the present invention also provides diagnostic assays and methods, both quantitative and qualitative for detecting the expression of at least one gene or genomic sequence selected from the group consisting of PTGER4; RUNX1; EVX2; EVX-1; SHOX2; SEQ ID NO: 6; CN027; LRAT; IL-12RB1; TFAP2C; BCL2; ARIDA5A (SEQ ID NO: 12); EN2; PRDM14; SEQ ID NO: 81; ARID5A (SEQ ID NO: 82); VAX1; ONECUT1; FOXL-2, TFAP2E and BARHL2 in a subject and determining therefrom upon the presence or absence of a subject's risk or increased risk to suffer from a cell proliferative disorders, or to detect a cell proliferative disorder preferably those according to Table 2 (most preferably lung carcinoma) in said subject. Particularly preferred is that the cell proliferative disorder is lung cancer and particularly preferred that it is selected from the group consisting of lung adenocarcinoma; large cell lung cancer; squamous cell lung carcinoma and small cell lung carcinoma.

[0100] Aberrant expression of mRNA transcribed from at least one gene or genomic sequence selected from the group consisting of PTGER4; RUNX1; EVX2; EVX-1; SHOX2; SEQ ID NO: 6; CN027; LRAT; IL-12RB1; TFAP2C; BCL2; ARIDA5A (SEQ ID NO: 12); EN2; PRDM14; SEQ ID NO: 81; ARID5A (SEQ ID NO: 82); VAX1; ONECUT1; FOXL-2, TFAP2E and BARHL2 is associated with the presence of cell proliferative disorders, preferably those according to Table 2 (most preferably lung carcinoma) in a subject. Particularly preferred is that the cell proliferative disorder is a lung cancer, preferably a lung cancer selected from the group consisting of lung adenocarcinoma, large cell lung cancer, squamous cell lung carcinoma and small cell lung carcinoma.

[0101] According to particular aspects of the present invention, hyper-methylation and/or under-expression is associated with the presence of cell proliferative disorders, in particular those according to Table 2 (most preferably lung carcinoma).

[0102] To detect the presence of mRNA encoding a gene or genomic sequence, a sample is obtained from a patient. The sample may be any suitable sample comprising cellular matter of the tumor. Suitable sample types include cells or cell lines, histological slides, biopsies, paraffin-embedded tissue, body fluids, ejaculate, urine, blood plasma, blood serum, whole blood, isolated blood cells, sputum and biological matter (such as body fluids or cells) derived from the oral ephithelium or from the lung, for example as a result of bronchoscopy (including but not limited to bronchial lavage, bronchial alveolar lavage, bronchial brushing, bronchial abrasion and all possible combinations thereof. More preferably the sample type is selected form the group consisting of blood plasma, sputum and biological matter (such as body fluids or cells) derived from the oral ephithelium or from the lung, for example as a result of bronchoscopy (including but not limited to bronchial lavage, bronchial alveolar lavage, bronchial brushing, bronchial abrasion) and all possible combinations thereof.

[0103] The sample may be treated to extract the RNA contained therein. The resulting nucleic acid from the sample is then analysed. Many techniques are known in the state of the art for determining absolute and relative levels of gene expression, commonly used techniques suitable for use in the present invention include in situ hybridisation (e.g. FISH), Northern analysis, RNase protection assays (RPA), microarrays and PCR-based techniques, such as quantitative PCR and differential display PCR or any other nucleic acid detection method.

[0104] Particularly preferred is the use of the reverse transcription/polymerisation chain reaction technique (RT-PCR). The method of RT-PCR is well known in the art (for example, see Watson and Fleming, supra).

[0105] The RT-PCR method can be performed as follows. Total cellular RNA is isolated by, for example, the standard guanidium isothiocyanate method and the total RNA is reverse transcribed. The reverse transcription method involves synthesis of DNA on a template of RNA using a reverse transcriptase enzyme and a 3′ end oligonucleotide dT primer and/or random hexamer primers. The cDNA thus produced is then amplified by means of PCR. (Belyaysky et al, Nucl Acid Res 17:2919-2932, 1989; Krug and Berger, Methods in Enzymology, Academic Press, N.Y., Vol. 152, pp. 316-325, 1987 which are incorporated by reference). Further preferred is the “Real-time” variant of RT-PCR, wherein the PCR product is detected by means of hybridisation probes (e.g. TaqMan, Lightcycler, Molecular Beacons & Scorpion) or SYBR green. The detected signal from the probes or SYBR green is then quantitated either by reference to a standard curve or by comparing the Ct values to that of a calibration standard. Analysis of housekeeping genes is often used to normalize the results.

[0106] In Northern blot analysis total or poly(A)+ mRNA is run on a denaturing agarose gel and detected by hybridisation to a labelled probe in the dried gel itself or on a membrane. The resulting signal is proportional to the amount of target RNA in the RNA population. Comparing the signals from two or more cell populations or tissues reveals relative differences in gene expression levels. Absolute quantitation can be performed by comparing the signal to a standard curve generated using known amounts of an in vitro transcript corresponding to the target RNA. Analysis of housekeeping genes, genes whose expression levels are expected to remain relatively constant regardless of conditions, is often used to normalize the results, eliminating any apparent differences caused by unequal transfer of RNA to the membrane or unequal loading of RNA on the gel.

[0107] The first step in Northern analysis is isolating pure, intact RNA from the cells or tissue of interest. Because Northern blots distinguish RNAs by size, sample integrity influences the degree to which a signal is localized in a single band. Partially degraded RNA samples will result in the signal being smeared or distributed over several bands with an overall loss in sensitivity and possibly an erroneous interpretation of the data. In Northern blot analysis, DNA, RNA and oligonucleotide probes can be used and these probes are preferably labelled (e.g. radioactive labels, mass labels or fluorescent labels). The size of the target RNA, not the probe, will determine the size of the detected band, so methods such as random-primed labelling, which generates probes of variable lengths, are suitable for probe synthesis. The specific activity of the probe will determine the level of sensitivity, so it is preferred that probes with high specific activities, are used.

[0108] In an RNase protection assay, the RNA target and an RNA probe of a defined length are hybridised in solution. Following hybridisation, the RNA is digested with RNases specific for single-stranded nucleic acids to remove any unhybridized, single-stranded target RNA and probe. The RNases are inactivated, and the RNA is separated e.g. by denaturing polyacrylamide gel electrophoresis. The amount of intact RNA probe is proportional to the amount of target RNA in the RNA population. RPA can be used for relative and absolute quantitation of gene expression and also for mapping RNA structure, such as intron/exon boundaries and transcription start sites. The RNase protection assay is preferable to Northern blot analysis as it generally has a lower limit of detection.

[0109] The antisense RNA probes used in RPA are generated by in vitro transcription of a DNA template with a defined endpoint and are typically in the range of 50-600 nucleotides. The use of RNA probes that include additional sequences not homologous to the target RNA allows the protected fragment to be distinguished from the full-length probe. RNA probes are typically used instead of DNA probes due to the ease of generating single-stranded RNA probes and the reproducibility and reliability of RNA:RNA duplex digestion with RNases (Ausubel et al. 2003), particularly preferred are probes with high specific activities.

[0110] Particularly preferred is the use of microarrays. The microarray analysis process can be divided into two main parts. First is the immobilization of known gene sequences onto glass slides or other solid support followed by hybridisation of the fluorescently labelled cDNA (comprising the sequences to be interrogated) to the known genes immobilized on the glass slide (or other solid phase). After hybridisation, arrays are scanned using a fluorescent microarray scanner. Analysing the relative fluorescent intensity of different genes provides a measure of the differences in gene expression.

[0111] DNA arrays can be generated by immobilizing presynthesized oligonucleotides onto prepared glass slides or other solid surfaces. In this case, representative gene sequences are manufactured and prepared using standard oligonucleotide synthesis and purification methods. These synthesized gene sequences are complementary to the RNA transcript(s) of at least one gene or genomic sequence selected from the group consisting of PTGER4; RUNX1; EVX2; EVX-1; SHOX2; SEQ ID NO: 6; CN027; LRAT; IL-12RB1; TFAP2C; BCL2; ARIDA5A (SEQ ID NO: 12); EN2; PRDM14; SEQ ID NO: 81; ARID5A (SEQ ID NO: 82); VAX1; ONECUT1; FOXL-2, TFAP2E and BARHL2 and tend to be shorter sequences in the range of 25-70 nucleotides. Alternatively, immobilized oligos can be chemically synthesized in situ on the surface of the slide. In situ oligonucleotide synthesis involves the consecutive addition of the appropriate nucleotides to the spots on the microarray; spots not receiving a nucleotide are protected during each stage of the process using physical or virtual masks. Preferably said synthesized nucleic acids are locked nucleic acids.

[0112] In expression profiling microarray experiments, the RNA templates used are representative of the transcription profile of the cells or tissues under study. RNA is first isolated from the cell populations or tissues to be compared. Each RNA sample is then used as a template to generate fluorescently labelled cDNA via a reverse transcription reaction. Fluorescent labelling of the cDNA can be accomplished by either direct labelling or indirect labelling methods. During direct labelling, fluorescently modified nucleotides (e.g., Cy®3- or Cy®5-dCTP) are incorporated directly into the cDNA during the reverse transcription. Alternatively, indirect labelling can be achieved by incorporating aminoallyl-modified nucleotides during cDNA synthesis and then conjugating an N-hydroxysuccinimide (NHS)-ester dye to the aminoallyl-modified cDNA after the reverse transcription reaction is complete. Alternatively, the probe may be unlabelled, but may be detectable by specific binding with a ligand, which is labelled, either directly or indirectly. Suitable labels and methods for labelling ligands (and probes) are known in the art, and include, for example, radioactive labels which may be incorporated by known methods (e.g., nick translation or kinasing). Other suitable labels include but are not limited to biotin, fluorescent groups, chemiluminescent groups (e.g., dioxetanes, particularly triggered dioxetanes), enzymes, antibodies, and the like.

[0113] To perform differential gene expression analysis, cDNA generated from different RNA samples are labelled with Cy®3. The resulting labelled cDNA is purified to remove unincorporated nucleotides, free dye and residual RNA. Following purification, the labelled cDNA samples are hybridised to the microarray. The stringency of hybridisation is determined by a number of factors during hybridisation and during the washing procedure, including temperature, ionic strength, length of time and concentration of formamide. These factors are outlined in, for example, Sambrook et al. (Molecular Cloning: A Laboratory Manual, 2nd ed., 1989). The microarray is scanned post-hybridisation using a fluorescent microarray scanner. The fluorescent intensity of each spot indicates the level of expression of the analysed gene; bright spots correspond to strongly expressed genes, while dim spots indicate weak expression.

[0114] Once the images are obtained, the raw data must be analysed. First, the background fluorescence must be subtracted from the fluorescence of each spot. The data is then normalized to a control sequence, such as exogenously added nucleic acids (preferably RNA or DNA), or a housekeeping gene panel to account for any non-specific hybridisation, array imperfections or variability in the array set-up, cDNA labelling, hybridisation or washing. Data normalization allows the results of multiple arrays to be compared.

[0115] Another aspect of the invention relates to a kit for use in diagnosis of cell proliferative disorders, preferably those according to Table 2 (most preferably lung carcinoma and further preferred is a lung cancer selected from the group consisting of lung adenocarcinoma; large cell lung cancer; squamous cell lung carcinoma; small cell lung carcinoma.) in a subject according to the methods of the present invention, said kit comprising: a means for measuring the level of transcription of at least one gene or genomic sequence selected from the group consisting of PTGER4; RUNX1; EVX2; EVX-1; SHOX2; SEQ ID NO: 6; CN027; LRAT; IL-12RB1; TFAP2C; BCL2; ARIDA5A (SEQ ID NO: 12); EN2; PRDM14; SEQ ID NO: 81; ARID5A (SEQ ID NO: 82); VAX1; ONECUT1; FOXL-2, TFAP2E and BARHL2. In a preferred embodiment the means for measuring the level of transcription comprise oligonucleotides or polynucleotides able to hybridise under stringent or moderately stringent conditions to the transcription products of at least one gene or genomic sequence selected from the group consisting of PTGER4; RUNX1; EVX2; EVX-1; SHOX2; SEQ ID NO: 6; CN027; LRAT; IL-12RB1; TFAP2C; BCL2; ARIDA5A (SEQ ID NO: 12); EN2; PRDM14; SEQ ID NO: 81; ARID5A (SEQ ID NO: 82); VAX1; ONECUT1; FOXL-2, TFAP2E and BARHL2 (including promoter or regulatory elements thereof) and EN2-2, EN2-3 and SHOX2-2. In a most preferred embodiment the level of transcription is determined by techniques selected from the group of Northern Blot analysis, reverse transcriptase PCR, real-time PCR, RNAse protection, and microarray. In another embodiment of the invention the kit further comprises means for obtaining a biological sample of the patient. Preferred is a kit, which further comprises a container which is most preferably suitable for containing the means for measuring the level of transcription and the biological sample of the patient, and most preferably further comprises instructions for use and interpretation of the kit results.

[0116] In a preferred embodiment, the kit comprises (a) a plurality of oligonucleotides or polynucleotides able to hybridise under stringent or moderately stringent conditions to the transcription products of at least one gene or genomic sequence selected from the group consisting of PTGER4; RUNX1; EVX2; EVX-1; SHOX2; SEQ ID NO: 6; CN027; LRAT; IL-12RB1; TFAP2C; BCL2; ARIDA5A (SEQ ID NO: 12); EN2; PRDM14; SEQ ID NO: 81; ARID5A (SEQ ID NO: 82); VAX1; ONECUT1; FOXL-2, TFAP2E and BARHL2 (including promoter or regulatory elements thereof) and EN2-2, EN2-3 and SHOX2-2; (b) a container, preferably suitable for containing the oligonucleotides or polynucleotides and a biological sample of the patient comprising the transcription products wherein the oligonucleotides or polynucleotides can hybridise under stringent or moderately stringent conditions to the transcription products, (c) means to detect the hybridisation of (b); and optionally, (d) instructions for use and interpretation of the kit results.

[0117] The kit may also contain other components such as hybridisation buffer (where the oligonucleotides are to be used as a probe) packaged in a separate container. Alternatively, where the oligonucleotides are to be used to amplify a target region, the kit may contain, packaged in separate containers, a polymerase and a reaction buffer optimised for primer extension mediated by the polymerase, such as PCR. Preferably said polymerase is a reverse transcriptase. It is further preferred that said kit further contains an Rnase reagent.

[0118] The present invention further provides for methods for the detection of the presence of the polypeptide encoded by said gene sequences in a sample obtained from a patient.

[0119] Aberrant levels of polypeptide expression of the polypeptides encoded at least one gene or genomic sequence selected from the group consisting of PTGER4; RUNX1; EVX2; EVX-1; SHOX2; SEQ ID NO: 6; CN027; LRAT; IL-12RB1; TFAP2C; BCL2; ARIDA5A (SEQ ID NO: 12); EN2; PRDM14; SEQ ID NO: 81; ARID5A (SEQ ID NO: 82); VAX1; ONECUT1; FOXL-2, TFAP2E and BARHL2 are associated with the presence of cell proliferative disorders, preferably those according to Table 2 (most preferably lung carcinoma). Particularly preferred is a lung cancer selected from the group consisting of lung adenocarcinoma; large cell lung cancer; squamous cell lung carcinoma; small cell lung carcinoma.

[0120] According to the present invention under-expression of said polypeptides is associated with the presence of cell proliferative disorders, preferably those according to Table 2 (most preferably lung carcinoma). It is particularly preferred that the cell proliferative disorder is lung cancer and that it is selected from the group consisting of lung adenocarcinoma; large cell lung cancer; squamous cell lung carcinoma and small cell lung carcinoma.

[0121] Any method known in the art for detecting polypeptides can be used. Such methods include, but are not limited to mass-spectrometry, immunodiffusion, immunoelectrophoresis, immunochemical methods, binder-ligand assays, immunohistochemical techniques, agglutination and complement assays (e.g., see Basic and Clinical Immunology, Sites and Terr, eds., Appleton & Lange, Norwalk, Conn. pp 217-262, 1991 which is incorporated by reference). Preferred are binder-ligand immunoassay methods including reacting antibodies with an epitope or epitopes and competitively displacing a labelled polypeptide or derivative thereof.

[0122] Certain embodiments of the present invention comprise the use of antibodies specific to the polypeptide(s) encoded by at least one gene or genomic sequence selected from the group consisting of PTGER4; RUNX1; EVX2; EVX-1; SHOX2; SEQ ID NO: 6; CN027; LRAT; IL-12RB1; TFAP2C; BCL2; ARIDA5A (SEQ ID NO: 12); EN2; PRDM14; SEQ ID NO: 81; ARID5A (SEQ ID NO: 82); VAX1; ONECUT1; FOXL-2, TFAP2E and BARHL2.

[0123] Such antibodies are useful for cell proliferative disorders, preferably of those diseases according to Table 2, and most preferably in the diagnosis of lung carcinoma. Particularly preferred is a lung cancer selected from the group consisting of lung adenocarcinoma; large cell lung cancer; squamous cell lung carcinoma; small cell lung carcinoma. In certain embodiments production of monoclonal or polyclonal antibodies can be induced by the use of an epitope encoded by a polypeptide of at least one gene or genomic sequence selected from the group consisting of PTGER4; RUNX1; EVX2; EVX-1; SHOX2; SEQ ID NO: 6; CN027; LRAT; IL-12RB1; TFAP2C; BCL2; ARIDA5A (SEQ ID NO: 12); EN2; PRDM14; SEQ ID NO: 81; ARID5A (SEQ ID NO: 82); VAX1; ONECUT1; FOXL-2, TFAP2E and BARHL2 as an antigene. Such antibodies may in turn be used to detect expressed polypeptides as markers for cell proliferative disorders, preferably those according to Table 2 and most preferably the diagnosis of lung carcinoma. Particularly preferred is a lung cancer selected from the group consisting of lung adenocarcinoma; large cell lung cancer; squamous cell lung carcinoma; small cell lung carcinoma. The levels of such polypeptides present may be quantified by conventional methods. Antibody-polypeptide binding may be detected and quantified by a variety of means known in the art, such as labelling with fluorescent or radioactive ligands. The invention further comprises kits for performing the above-mentioned procedures, wherein such kits contain antibodies specific for the investigated polypeptides.

[0124] Numerous competitive and non-competitive polypeptide binding immunoassays are well known in the art. Antibodies employed in such assays may be unlabelled, for example as used in agglutination tests, or labelled for use a wide variety of assay methods. Labels that can be used include radionuclides, enzymes, fluorescers, chemiluminescers, enzyme substrates or co-factors, enzyme inhibitors, particles, dyes and the like. Preferred assays include but are not limited to radioimmunoassay (RIA), enzyme immunoassays, e.g., enzyme-linked immunosorbent assay (ELISA), fluorescent immunoassays and the like. Polyclonal or monoclonal antibodies or epitopes thereof can be made for use in immunoassays by any of a number of methods known in the art.

[0125] In an alternative embodiment of the method the proteins may be detected by means of western blot analysis. Said analysis is standard in the art, briefly proteins are separated by means of electrophoresis e.g. SDS-PAGE. The separated proteins are then transferred to a suitable membrane (or paper) e.g. nitrocellulose, retaining the spacial separation achieved by electrophoresis. The membrane is then incubated with a blocking agent to bind remaining sticky places on the membrane, commonly used agents include generic protein (e.g. milk protein). An antibody specific to the protein of interest is then added, said antibody being detectably labelled for example by dyes or enzymatic means (e.g. alkaline phosphatase or horseradish peroxidase). The location of the antibody on the membrane is then detected.

[0126] In an alternative embodiment of the method the proteins may be detected by means of immunohistochemistry (the use of antibodies to probe specific antigens in a sample). Said analysis is standard in the art, wherein detection of antigens in tissues is known as immunohistochemistry, while detection in cultured cells is generally termed immunocytochemistry. Briefly, the primary antibody is to be detected by binding to its specific antigen. The antibody-antigen complex is then bound by a secondary enzyme-conjugated antibody. In the presence of the necessary substrate and chromogen the bound enzyme is detected according to coloured deposits at the antibody-antigen binding sites. There is a wide range of suitable sample types, antigen-antibody affinity, antibody types, and detection enhancement methods. Thus, optimal conditions for immunohistochemical or immunocytochemical detection must be determined by the person skilled in the art for each individual case.

[0127] One approach for preparing antibodies to a polypeptide is the selection and preparation of an amino acid sequence of all or part of the polypeptide, chemically synthesising the amino acid sequence and injecting it into an appropriate animal, usually a rabbit or a mouse (Milstein and Kohler Nature 256:495-497, 1975; Gulfre and Milstein, Methods in Enzymology: Immunochemical Techniques 73:1-46, Langone and Banatis eds., Academic Press, 1981 which are incorporated by reference in its entirety). Methods for preparation of the polypeptides or epitopes thereof include, but are not limited to chemical synthesis, recombinant DNA techniques or isolation from biological samples.

[0128] In the final step of the method the diagnosis of the patient is determined, whereby under-expression (of mRNA or polypeptides) is indicative of the presence of cell proliferative disorders, preferably those according to Table 2 (most preferably lung carcinoma). Particularly preferred it is a lung cancer, preferably selected from the group consisting of lung adenocarcinoma; large cell lung cancer; squamous cell lung carcinoma and small cell lung carcinoma. The term under-expression shall be taken to mean expression at a detected level less than a pre-determined cut off which may be selected from the group consisting of the mean, median or an optimised threshold value. The term over-expression shall be taken to mean expression at a detected level greater than a pre-determined cut off which may be selected from the group consisting of the mean, median or an optimised threshold value.

[0129] Another aspect of the invention provides a kit for use in diagnosis of cell proliferative disorders, preferably those according to Table 2 (most preferably lung carcinoma) in a subject according to the methods of the present invention, comprising: a means for detecting polypeptides of at least one gene or genomic sequence selected from the group consisting of PTGER4; RUNX1; EVX2; EVX-1; SHOX2; SEQ ID NO: 6; CN027; LRAT; IL-12RB1; TFAP2C; BCL2; ARIDA5A (SEQ ID NO: 12); EN2; PRDM14; SEQ ID NO: 81; ARID5A (SEQ ID NO: 82); VAX1; ONECUT1; FOXL-2, TFAP2E and BARHL2. The means for detecting the polypeptides comprise preferably antibodies, antibody derivatives, or antibody fragments. The polypeptides are most preferably detected by means of Western Blotting utilizing a labelled antibody. In another embodiment of the invention the kit further comprising means for obtaining a biological sample of the patient. Preferred is a kit, which further comprises a container suitable for containing the means for detecting the polypeptides in the biological sample of the patient, and most preferably further comprises instructions for use and interpretation of the kit results. In a preferred embodiment the kit comprises: (a) a means for detecting polypeptides of at least one gene or genomic sequence selected from the group consisting of PTGER4; RUNX1; EVX2; EVX-1; SHOX2; SEQ ID NO: 6; CN027; LRAT; IL-12RB1; TFAP2C; BCL2; ARIDA5A (SEQ ID NO: 12); EN2; PRDM14; SEQ ID NO: 81; ARID5A (SEQ ID NO: 82); VAX1; ONECUT1; FOXL-2, TFAP2E and BARHL2; (b) a container suitable for containing the said means and the biological sample of the patient comprising the polypeptides wherein the means can form complexes with the polypeptides; (c) a means to detect the complexes of (b); and optionally (d) instructions for use and interpretation of the kit results.

[0130] The kit may also contain other components such as buffers or solutions suitable for blocking, washing or coating, packaged in a separate container.

[0131] Particular embodiments of the present invention provide a novel application of the analysis of methylation status, methylation levels and/or patterns within at least one gene or genomic sequence selected from the group consisting of PTGER4; RUNX1; EVX2; EVX-1; SHOX2; SEQ ID NO: 6; CN027; LRAT; IL-12RB1; TFAP2C; BCL2; ARIDA5A (SEQ ID NO: 12); EN2; PRDM14; SEQ ID NO: 81; ARID5A (SEQ ID NO: 82); VAX1; ONECUT1; FOXL-2, TFAP2E and BARHL2 (including promoter or regulatory elements thereof) and EN2-2, EN2-3 and SHOX2-2. that enables a precise detection, characterisation, assessment of risk to suffer from cell proliferative disorders, preferably those according to Table 2 (most preferably lung carcinoma). It is particularly preferred that this lung cancer is selected from the group consisting of lung adenocarcinoma; large cell lung cancer; squamous cell lung carcinoma and small cell lung carcinoma. Early detection of cell proliferative disorders, in particular lung carcinoma, is directly linked with disease prognosis, and the disclosed method thereby enables the physician and patient to make better and more informed treatment decisions. Therefore it is preferred that the method of the invention, which allows detection of disease in an early stage, is performed as a screening tool, or as an additional diagnostic test, whenever a first diagnosis is unclear.

[0132] The preferred sample type used within the method of the invention is sputum or biological samples derived from the lung, preferably, bronchial fluid, bronchial lavage and bronchoalveolar lavage. This sample type has the advantage that it is a sample, which is currently used in common practice and obtainable by established and routine diagnostic procedures of lung disease as part of the standard care (e.g. histology procedures and/or cytology procedures). The advantage of using available samples is that additional information from the same sample can be achieved. The second advantage is, that these samples can be obtained non-invasively (for example sputum) or with low risk to the subject or patient.

[0133] Another important advantage of using samples, which are collected from the bronchial system, is that the marker that can be used for a specific diagnosis of lung cancer or risk assessment of lung cancer may be less specific in terms cancer type. It would not harm, if the same marker is also detecting other cancer types (if tested on other sample types, for example blood).

[0134] In the most preferred embodiment of the method, the presence or absence of risk or increased risk of a subject to suffer from a cell proliferative disorder, or detecting of a cell proliferative disorder, preferably those according to Table 2 (most preferably lung carcinoma, in particular a lung cancer selected from the group consisting of lung adenocarcinoma; large cell lung cancer; squamous cell lung carcinoma and small cell lung carcinoma.) is determined by analysis of the methylation status or level of one or more CpG dinucleotides of at least one gene or genomic sequence selected from the group consisting of PTGER4; RUNX1; EVX2; EVX-1; SHOX2; SEQ ID NO: 6; CN027; LRAT; IL-12RB1; TFAP2C; BCL2; ARIDA5A (SEQ ID NO: 12); EN2; PRDM14; SEQ ID NO: 81; ARID5A (SEQ ID NO: 82); VAX1; ONECUT1; FOXL-2, TFAP2E and BARHL2 (including promoter or regulatory elements thereof) and EN2-2, EN2-3 and SHOX2-2.

[0135] In one embodiment the invention of said method comprises the following steps: i) contacting genomic DNA (preferably isolated from body fluids) obtained from the subject with at least one reagent, or series of reagents that distinguishes between methylated and non-methylated CpG dinucleotides within at least one gene or genomic sequence selected from the group consisting of PTGER4; RUNX1; EVX2; EVX-1; SHOX2; SEQ ID NO: 6; CN027; LRAT; IL-12RB1; TFAP2C; BCL2; ARIDA5A (SEQ ID NO: 12); EN2; PRDM14; SEQ ID NO: 81; ARID5A (SEQ ID NO: 82); VAX1; ONECUT1; FOXL-2, TFAP2E and BARHL2 (including promoter or regulatory elements thereof) and EN2-2, EN2-3 and SHOX2-2 and ii) detecting cell proliferative disorders, preferably those according to Table 2 (most preferably lung carcinoma). Particularly preferred is a lung cancer selected from the group consisting of lung adenocarcinoma; large cell lung cancer; squamous cell lung carcinoma and small cell lung carcinoma.

[0136] It is preferred that said one or more CpG dinucleotides of at least one gene or genomic sequence selected from the group consisting of PTGER4; RUNX1; EVX2; EVX-1; SHOX2; SEQ ID NO: 6; CN027; LRAT; IL-12RB1; TFAP2C; BCL2; ARIDA5A (SEQ ID NO: 12); EN2; PRDM14; SEQ ID NO: 81; ARID5A (SEQ ID NO: 82); VAX1; ONECUT1; FOXL-2, TFAP2E and BARHL2 (including promoter or regulatory elements thereof) and EN2-2, EN2-3 and SHOX2-2 are comprised within a respective genomic target sequence thereof as provided in SEQ ID NO: 1 to SEQ ID NO: 12; SEQ ID NO: 79 to SEQ ID NO: 83 and SEQ ID NO: 119 to SEQ ID NO: 125 and complements thereof. The present invention further provides a method for ascertaining genetic and/or epigenetic parameters of at least one gene or genomic sequence selected from the group consisting of PTGER4; RUNX1; EVX2; EVX-1; SHOX2; SEQ ID NO: 6; CN027; LRAT; IL-12RB1; TFAP2C; BCL2; ARIDA5A (SEQ ID NO: 12); EN2; PRDM14; SEQ ID NO: 81; ARID5A (SEQ ID NO: 82); VAX1; ONECUT1; FOXL-2, TFAP2E and BARHL2 (including promoter or regulatory elements thereof) and EN2-2, EN2-3 and SHOX2-2 and/or the genomic sequence according to SEQ ID NO: 1 to SEQ ID NO: 12; SEQ ID NO: 79 to SEQ ID NO: 83 and SEQ ID NO: 119 to SEQ ID NO: 125 within a subject by analysing cytosine methylation. Said method comprising contacting a nucleic acid comprising SEQ ID NO: 1 to SEQ ID NO: 12; SEQ ID NO: 79 to SEQ ID NO: 83 and SEQ ID NO: 119 to SEQ ID NO: 125 in a biological sample obtained from said subject with at least one reagent or a series of reagents, wherein said reagent or series of reagents, distinguishes between methylated and non-methylated CpG dinucleotides within the target nucleic acid.

[0137] In a preferred embodiment, said method comprises the following steps: In the first step, a sample of the tissue to be analysed is obtained. The source may be any suitable source, such as cells or cell lines, histological slides, biopsies, paraffin-embedded tissue, body fluids, ejaculate, urine, blood plasma, blood serum, whole blood, isolated blood cells, sputum, biological matter (such as body fluids or cells) derived from the oral ephithelium, or biological samples derived from the lung, preferably as a result of bronchoscopy including but not limited to bronchial lavage, bronchial alveolar lavage, bronchial brushing, bronchial abrasion and all possible combinations thereof. More preferably the sample type is selected form the group consisting of blood plasma, sputum, biological samples derived from the lung, preferably biological matter derived from bronchoscopy (including but not limited to bronchial lavage, bronchial alveolar lavage, bronchial brushing, bronchial abrasion) and all possible combinations thereof. It is a preferred embodiment of the method of the invention that the sample type is selected from the group consisting of sputum, oral epithelium and biological samples derived from the lung (as described earlier), most preferably this biological matter is derived from bronchoscopy (including but not limited to bronchial lavage, bronchial alveolar lavage, bronchial brushing, bronchial abrasion).

[0138] The genomic DNA is then isolated from the sample. Genomic DNA may be isolated by any means standard in the art, including the use of commercially available kits. Briefly, wherein the DNA of interest is encapsulated in by a cellular membrane the biological sample must be disrupted and lysed by enzymatic, chemical or mechanical means. The DNA solution may then be cleared of proteins and other contaminants e.g. by digestion with proteinase K. The genomic DNA is then recovered from the solution. This may be carried out by means of a variety of methods including salting out, organic extraction or binding of the DNA to a solid phase support. The choice of method will be affected by several factors including time, expense and required quantity of DNA.

[0139] Wherein the sample DNA is not enclosed in a membrane (e.g. circulating DNA from a blood sample) methods standard in the art for the isolation and/or purification of DNA may be employed. Such methods include the use of a protein degenerating reagent e.g. chaotropic salt e.g. guanidine hydrochloride or urea; or a detergent e.g. sodium dodecyl sulphate (SDS), cyanogen bromide. Alternative methods include but are not limited to ethanol precipitation or propanol precipitation, vacuum concentration amongst others by means of a centrifuge. The person skilled in the art may also make use of devices such as filter devices e.g. ultrafiltration, silica surfaces or membranes, magnetic particles, polystyrol particles, polystyrol surfaces, positively charged surfaces, and positively charged membranes, charged membranes, charged surfaces, charged switch membranes, charged switched surfaces.

[0140] Once the nucleic acids have been extracted, the genomic double stranded DNA is used in the analysis.

[0141] In the second step of the method, the genomic DNA sample is treated in such a manner that cytosine bases, which are unmethylated at the 5′-position, are converted to uracil, thymine, or another base which is dissimilar to cytosine in terms of hybridisation behaviour. This will be understood as ‘pre-treatment’ or ‘treatment’ herein.

[0142] This explicit order of steps is only one embodiment of the method of the invention, because it is also possible and sometimes advantageous to omit the DNA isolation step prior to the Bisulfite treatment. In that case the bisulfite treatment (see in detail below) is performed before the DNA is isolated and/or purified, for example if the sample DNA is not enclosed in a membrane. Hence the bisulfite treatment may be performed on a crude sample, i.e. the biological material itself. In some cases, the presence of a surfactant, such as for example SDS, may be needed.

[0143] This is preferably achieved by means of treatment with a bisulfite reagent. The term “bisulfite reagent” refers to a reagent comprising bisulfite, disulfite, hydrogen sulfite or combinations thereof, useful as disclosed herein to distinguish between methylated and unmethylated CpG dinucleotide sequences. Methods of said treatment are known in the art (e.g. PCT/EP2004/011715, which is incorporated by reference in its entirety). It is preferred that the bisulfite treatment is conducted in the presence of denaturing solvents such as but not limited to n-alkyleneglycol, particularly diethylene glycol dimethyl ether (DME), or in the presence of dioxane or dioxane derivatives. In a preferred embodiment the denaturing solvents are used in concentrations between 1% and 35% (v/v). It is also preferred that the bisulfite reaction is carried out in the presence of scavengers such as but not limited to chromane derivatives, e.g., 6-hydroxy-2, 5,7,8, -tetramethylchromane 2-carboxylic acid or trihydroxybenzo acid and derivates thereof, e.g. Gallic acid (see: PCT/EP2004/011715 which is incorporated by reference in its entirety). The bisulfite conversion is preferably carried out at a reaction temperature between 30° C. and 70° C., whereby the temperature is increased to over 85° C. for short periods of times during the reaction (see: PCT/EP2004/011715 which is incorporated by reference in its entirety). The bisulfite treated DNA is preferably purified priori to the quantification. This may be conducted by any means known in the art, such as but not limited to ultrafiltration, preferably carried out by means of Microcon̂™ columns (manufactured by Milliporê™). The purification is carried out according to a modified manufacturer's protocol (see: PCT/EP2004/011715 which is incorporated by reference in its entirety).

[0144] In the third step of the method, fragments of the treated DNA are amplified, using sets of primer oligonucleotides according to the present invention, and an amplification enzyme. The amplification of several DNA segments can be carried out simultaneously in one and the same reaction vessel. Typically, the amplification is carried out using a polymerase chain reaction (PCR). Preferably said amplificates are 100 to 2,000 base pairs in length. The set of primer oligonucleotides includes at least two oligonucleotides whose sequences are each reverse complementary, identical, or hybridise under stringent or highly stringent conditions to an at least 16-base-pair long segment of the base sequences of one of SEQ ID NO: 13 to SEQ ID NO: 60; SEQ ID NO: 84 to SEQ ID NO: 103, SEQ ID NO: 126 to SEQ ID NO: 153 and sequences complementary thereto.

[0145] In an alternate embodiment of the method, the methylation status or level of pre-selected CpG positions within at least one gene or genomic sequence selected from the group consisting of PTGER4; RUNX1; EVX2; EVX-1; SHOX2; SEQ ID NO: 6; CN027; LRAT; IL-12RB1; TFAP2C; BCL2; ARIDA5A (SEQ ID NO: 12); EN2; PRDM14; SEQ ID NO: 81; ARID5A (SEQ ID NO: 82); VAX1; ONECUT1; FOXL-2, TFAP2E and BARHL2 (including promoter or regulatory elements thereof) and EN2-2, EN2-3 and SHOX2-2 and preferably within the nucleic acid sequences according to SEQ ID NO: 1 to SEQ ID NO: 12; SEQ ID NO: 79 to SEQ ID NO: 83 and SEQ ID NO: 119 to SEQ ID NO: 125, may be detected by use of methylation-specific primer oligonucleotides. This technique (MSP) has been described in U.S. Pat. No. 6,265,171 to Herman. The use of methylation status specific primers for the amplification of bisulfite treated DNA allows the differentiation between methylated and unmethylated nucleic acids. MSP primer pairs contain at least one primer, which hybridises to a bisulfite treated CpG dinucleotide. Therefore, the sequence of said primers comprises at least one CpG dinucleotide. MSP primers specific for non-methylated DNA contain a “T’ at the position of the C position in the CpG. Preferably, therefore, the base sequence of said primers is required to comprise a sequence having a length of at least 9 nucleotides which hybridises to a treated nucleic acid sequence according to one of SEQ ID NO: 13 to SEQ ID NO: 60; SEQ ID NO: 84 to SEQ ID NO: 103, SEQ ID NO: 126 to SEQ ID NO: 153 and sequences complementary thereto, wherein the base sequence of said oligomers comprises at least one CpG dinucleotide. A further preferred embodiment of the method comprises the use of blocker oligonucleotides (the HeavyMethyl™ assay). The use of such blocker oligonucleotides has been described in Yu et al. (BioTechniques 23:714-720, 1997). Blocking probe oligonucleotides are hybridised to the bisulfite treated nucleic acid concurrently with the PCR primers. PCR amplification of the nucleic acid is terminated at the 5′ position of the blocking probe, such that amplification of a nucleic acid is suppressed where the complementary sequence to the blocking probe is present. The probes may be designed to hybridize to the bisulfite treated nucleic acid in a methylation status specific manner. For example, for detection of methylated nucleic acids within a population of unmethylated nucleic acids, suppression of the amplification of nucleic acids which are unmethylated at the position in question would be carried out by the use of blocking probes comprising a ‘CpA’ or ‘TpA’ at the position in question, as opposed to a ‘CpG’ if the suppression of amplification of methylated nucleic acids is desired.

[0146] For PCR methods using blocker oligonucleotides, efficient disruption of polymerase-mediated amplification requires that blocker oligonucleotides not be elongated by the polymerase. Preferably, this is achieved through the use of blockers that are 3′-deoxyoligonucleotides, or oligonucleotides derivitized at the 3′ position with other than a “free” hydroxyl group. For example, 3′-O-acetyl oligonucleotides are representative of a preferred class of blocker molecule.

[0147] Additionally, polymerase-mediated decomposition of the blocker oligonucleotides should be precluded. Preferably, such preclusion comprises either use of a polymerase lacking 5′-3′ exonuclease activity, or use of modified blocker oligonucleotides having, for example, thioate bridges at the 5′-termini thereof that render the blocker molecule nuclease-resistant. Particular applications may not require such 5′ modifications of the blocker. For example, if the blocker- and primer-binding sites overlap, thereby precluding binding of the primer (e.g., with excess blocker), degradation of the blocker oligonucleotide will be substantially precluded. This is because the polymerase will not extend the primer toward, and through (in the 5′-3′ direction) the blocker—a process that normally results in degradation of the hybridized blocker oligonucleotide.

[0148] A particularly preferred blocker/PCR embodiment, for purposes of the present invention and as implemented herein, comprises the use of peptide nucleic acid (PNA) oligomers as blocking oligonucleotides. Such PNA blocker oligomers are ideally suited, because they are neither decomposed nor extended by the polymerase.

[0149] Preferably, therefore, the base sequence of said blocking oligonucleotides is required to comprise a sequence having a length of at least 9 nucleotides which hybridises to a treated nucleic acid sequence according to one of SEQ ID NO: 13 to SEQ ID NO: 60; SEQ ID NO: 84 to SEQ ID NO: 103, SEQ ID NO: 126 to SEQ ID NO: 153 and sequences complementary thereto, wherein the base sequence of said oligonucleotides comprises at least one CpG, TpG or CpA dinucleotide.

[0150] The fragments obtained by means of the amplification can carry a directly or indirectly detectable label. Preferred are labels in the form of fluorescence labels, radionuclides, or detachable molecule fragments having a typical mass which can be detected in a mass spectrometer. Where said labels are mass labels, it is preferred that the labelled amplificates have a single positive or negative net charge, allowing for better delectability in the mass spectrometer. The detection may be carried out and visualized by means of, e.g., matrix assisted laser desorption/ionization mass spectrometry (MALDI) or using electron spray mass spectrometry (ESI).

[0151] Matrix Assisted Laser Desorption/Ionization Mass Spectrometry (MALDI-TOF) is a very efficient development for the analysis of biomolecules (Karas & Hillenkamp, Anal Chem., 60:2299-301, 1988). An analyte is embedded in a light-absorbing matrix. The matrix is evaporated by a short laser pulse thus transporting the analyte molecule into the vapor phase in an unfragmented manner. The analyte is ionized by collisions with matrix molecules. An applied voltage accelerates the ions into a field-free flight tube. Due to their different masses, the ions are accelerated at different rates. Smaller ions reach the detector sooner than bigger ones. MALDI-TOF spectrometry is well suited to the analysis of peptides and proteins. The analysis of nucleic acids is somewhat more difficult (Gut & Beck, Current Innovations and Future Trends, 1:147-57, 1995). The sensitivity with respect to nucleic acid analysis is approximately 100-times less than for peptides, and decreases disproportionally with increasing fragment size. Moreover, for nucleic acids having a multiply negatively charged backbone, the ionization process via the matrix is considerably less efficient. In MALDI-TOF spectrometry, the selection of the matrix plays an eminently important role. For desorption of peptides, several very efficient matrixes have been found which produce a very fine crystallisation. There are now several responsive matrixes for DNA, however, the difference in sensitivity between peptides and nucleic acids has not been reduced. This difference in sensitivity can be reduced, however, by chemically modifying the DNA in such a manner that it becomes more similar to a peptide. For example, phosphorothioate nucleic acids, in which the usual phosphates of the backbone are substituted with thiophosphates, can be converted into a charge-neutral DNA using simple alkylation chemistry (Gut & Beck, Nucleic Acids Res. 23: 1367-73, 1995). The coupling of a charge tag to this modified DNA results in an increase in MALDI-TOF sensitivity to the same level as that found for peptides. A further advantage of charge tagging is the increased stability of the analysis against impurities, which makes the detection of unmodified substrates considerably more difficult.

[0152] In the fourth step of the method, the amplificates obtained during the third step of the method are analysed in order to ascertain the methylation status of the CpG dinucleotides prior to the treatment.

[0153] In embodiments where the amplificates were obtained by means of MSP amplification, the presence or absence of an amplificate is in itself indicative of the methylation state of the CpG positions covered by the primer, according to the base sequences of said primer.

[0154] Amplificates obtained by means of both standard and methylation specific PCR may be further analysed by means of based-based methods such as, but not limited to, array technology and probe based technologies as well as by means of techniques such as sequencing and template directed extension.

[0155] In one embodiment of the method, the amplificates synthesised in step three are subsequently hybridized to an array or a set of oligonucleotides and/or PNA probes. In this context, the hybridization takes place in the following manner: the set of probes used during the hybridization is preferably composed of at least 2 oligonucleotides or PNA-oligomers; in the process, the amplificates serve as probes which hybridize to oligonucleotides previously bonded to a solid phase; the non-hybridized fragments are subsequently removed; said oligonucleotides contain at least one base sequence having a length of at least 9 nucleotides which is reverse complementary or identical to a segment of the base sequences specified in the present Sequence Listing; and the segment comprises at least one CpG, TpG or CpA dinucleotide. The hybridizing portion of the hybridizing nucleic acids is typically at least 9, 15, 20, 25, 30 or 35 nucleotides in length. However, longer molecules have inventive utility, and are thus within the scope of the present invention.

[0156] In a preferred embodiment, said dinucleotide is present in the central third of the oligomer. For example, wherein the oligomer comprises one CpG dinucleotide, said dinucleotide is preferably the fifth to ninth nucleotide from the 5′-end of a 13-mer. One oligonucleotide exists for the analysis of each CpG dinucleotide within a sequence selected from the group consisting SEQ ID NO: 1 to SEQ ID NO: 12; SEQ ID NO: 79 to SEQ ID NO: 83 and SEQ ID NO: 119 to SEQ ID NO: 125, and the equivalent positions within SEQ ID NO: 13 to SEQ ID NO: 60; SEQ ID NO: 84 to SEQ ID NO: 103, SEQ ID NO: 126 to SEQ ID NO: 153. Said oligonucleotides may also be present in the form of peptide nucleic acids. The non-hybridised amplificates are then removed. The hybridised amplificates are then detected. In this context, it is preferred that labels attached to the amplificates are identifiable at each position of the solid phase at which an oligonucleotide sequence is located.

[0157] In yet a further embodiment of the method, the genomic methylation status of the CpG positions may be ascertained by means of oligonucleotide probes (as detailed above) that are hybridised to the bisulfite treated DNA concurrently with the PCR amplification primers (wherein said primers may either be methylation specific or standard).

[0158] A particularly preferred embodiment of this method is the use of fluorescence-based Real Time Quantitative PCR (Heid et al., Genome Res. 6:986-994, 1996; also see U.S. Pat. No. 6,331,393) employing a dual-labelled fluorescent oligonucleotide probe (TaqMan™ PCR, using an ABI Prism 7700 Sequence Detection System, Perkin Elmer Applied Biosystems, Foster City, Calif.). The TaqMan™ PCR reaction employs the use of a non-extendible interrogating oligonucleotide, called a TaqMan™ probe, which, in preferred embodiments, is designed to hybridise to a CpG-rich sequence located between the forward and reverse amplification primers. The TaqMan™ probe further comprises a fluorescent “reporter moiety” and a “quencher moiety” covalently bound to linker moieties (e.g., phosphoramidites) attached to the nucleotides of the TaqMan™ oligonucleotide. For analysis of methylation within nucleic acids subsequent to bisulfite treatment, it is required that the probe be methylation specific, as described in U.S. Pat. No. 6,331,393, (hereby incorporated by reference in its entirety) also known as the MethyLight™™ assay. Variations on the TaqMan™ detection methodology that are also suitable for use with the described invention include the use of dual-probe technology (Lightcycler™) or fluorescent amplification primers (Sunrise™ technology). Both these techniques may be adapted in a manner suitable for use with bisulfite treated DNA, and moreover for methylation analysis within CpG dinucleotides.

[0159] In a further preferred embodiment of the method, the fourth step of the method comprises the use of template-directed oligonucleotide extension, such as MS-SNuPE as described by Gonzalgo & Jones, Nucleic Acids Res. 25:2529-2531, 1997.

[0160] In yet a further embodiment of the method, the fourth step of the method comprises sequencing and subsequent sequence analysis of the amplificate generated in the third step of the method (Sanger F., et al., Proc Natl Acad Sci USA 74:5463-5467, 1977).

### Best Mode

[0161] In a preferred embodiment of the method, the genomic nucleic acids are isolated and treated according to the first three steps of the method outlined above, namely:

[0162] a) obtaining, from a subject, a biological sample having subject genomic DNA;

[0163] b) extracting or otherwise isolating the genomic DNA;

[0164] c) treating the genomic DNA of b), or a fragment thereof, with one or more reagents to convert cytosine bases that are unmethylated in the 5-position thereof to uracil or to another base that is detectably dissimilar to cytosine in terms of hybridization properties; and wherein

[0165] d) amplifying subsequent to treatment in c) is carried out in a methylation specific manner, namely by use of methylation specific primers or methylation specific blocking oligonucleotides, and further wherein

[0166] e) detecting of the amplificates is carried out by means of a real-time detection probe, as described above.

[0167] Preferably, where the subsequent amplification of d) is carried out by means of methylation specific primers, as described above, said methylation specific primers comprise a sequence having a length of at least 9 nucleotides which hybridises to a treated nucleic acid sequence according to one of SEQ ID NO: 13 to SEQ ID NO: 60; SEQ ID NO: 84 to SEQ ID NO: 103, SEQ ID NO: 126 to SEQ ID NO: 153 and sequences complementary thereto, wherein the base sequence of said oligomers comprises at least one CpG dinucleotide, but preferably two or three.

[0168] Step e) of the method, namely the detection of the specific amplificates indicative of the methylation status of one or more CpG positions according to SEQ ID NO: 1 to SEQ ID NO: 12; SEQ ID NO: 79 to SEQ ID NO: 83 and SEQ ID NO: 119 to SEQ ID NO: 125 is carried out by means of real-time detection methods as described above.

[0169] Additional embodiments of the invention provide a method for the analysis of the methylation status of the at least one gene or genomic sequence selected from the group consisting of PTGER4; RUNX1; EVX2; EVX-1; SHOX2; SEQ ID NO: 6; CN027; LRAT; IL-12RB1; TFAP2C; BCL2; ARIDA5A (SEQ ID NO: 12); EN2; PRDM14; SEQ ID NO: 81; ARID5A (SEQ ID NO: 82); VAX1; ONECUT1; FOXL-2, TFAP2E and BARHL2 (including promoter or regulatory elements thereof) and EN2-2, EN2-3 and SHOX2-2 (preferably SEQ ID NO: 1 to SEQ ID NO: 12; SEQ ID NO: 79 to SEQ ID NO: 83 and SEQ ID NO: 119 to SEQ ID NO: 125, and complements thereof) without the need for bisulfite conversion. Methods are known in the art wherein a methylation sensitive restriction enzyme reagent, or a series of restriction enzyme reagents comprising methylation sensitive restriction enzyme reagents that distinguishes between methylated and non-methylated CpG dinucleotides within a target region are utilized in determining methylation, for example but not limited to DMH.

[0170] In the first step of such additional embodiments, the genomic DNA sample is isolated from tissue or cellular sources. Genomic DNA may be isolated by any means standard in the art, including the use of commercially available kits. Briefly, wherein the DNA of interest is encapsulated in by a cellular membrane the biological sample must be disrupted and lysed by enzymatic, chemical or mechanical means. The DNA solution may then be cleared of proteins and other contaminants, e.g., by digestion with proteinase K. The genomic DNA is then recovered from the solution. This may be carried out by means of a variety of methods including salting out, organic extraction or binding of the DNA to a solid phase support. The choice of method will be affected by several factors including time, expense and required quantity of DNA. All clinical sample types comprising neoplastic or potentially neoplastic matter are suitable for use in the present method, preferred are cells or cell lines, histological slides, biopsies, paraffin-embedded tissue, body fluids, ejaculate, urine, blood plasma, blood serum, whole blood, isolated blood cells, sputum, oral epithelium and biological samples derived from the lung, such as biological matter derived from bronchoscopy (including but not limited to bronchial lavage, bronchial alveolar lavage, bronchial brushing, bronchial abrasion and combinations thereof. More preferably the sample type is selected form the group consisting of blood plasma, sputum and biological matter derived from the lung, preferably derived from bronchoscopy (including but not limited to bronchial lavage, bronchial alveolar lavage, bronchial brushing and bronchial abrasion) and all possible combinations thereof.

[0171] Once the nucleic acids have been extracted, the genomic double-stranded DNA is used in the analysis.

[0172] In a preferred embodiment, the DNA may be cleaved prior to treatment with methylation sensitive restriction enzymes. Such methods are known in the art and may include both physical and enzymatic means. Particularly preferred is the use of one or a plurality of restriction enzymes which are not methylation sensitive, and whose recognition sites are AT rich and do not comprise CG dinucleotides. The use of such enzymes enables the conservation of CpG islands and CpG rich regions in the fragmented DNA. The non-methylation-specific restriction enzymes are preferably selected from the group consisting of MseI, BfaI, Csp6I, Tru1I, Tvu1I, Tru9I, Tvu9I, MaeI and XspI. Particularly preferred is the use of two or three such enzymes. Particularly preferred is the use of a combination of MseI, BfaI and Csp6I.

[0173] The fragmented DNA may then be ligated to adaptor oligonucleotides in order to facilitate subsequent enzymatic amplification. The ligation of oligonucleotides to blunt and sticky ended DNA fragments is known in the art, and is carried out by means of dephosphorylation of the ends (e.g. using calf or shrimp alkaline phosphatase) and subsequent ligation using ligase enzymes (e.g. T4 DNA ligase) in the presence of dATPs. The adaptor oligonucleotides are typically at least 18 base pairs in length.

[0174] In the third step, the DNA (or fragments thereof) is then digested with one or more methylation sensitive restriction enzymes. The digestion is carried out such that hydrolysis of the DNA at the restriction site is informative of the methylation status of a specific CpG dinucleotide of at least one gene or genomic sequence selected from the group consisting of PTGER4; RUNX1; EVX2; EVX-1; SHOX2; SEQ ID NO: 6; CN027; LRAT; IL-12RB1; TFAP2C; BCL2; ARIDA5A (SEQ ID NO: 12); EN2; PRDM14; SEQ ID NO: 81; ARID5A (SEQ ID NO: 82); VAX1; ONECUT1; FOXL-2, TFAP2E and BARHL2 (including promoter or regulatory elements thereof) and EN2-2, EN2-3 and SHOX2-2.

[0175] Preferably, the methylation-specific restriction enzyme is selected from the group consisting of Bsi E1, Hga I HinPI, Hpy99I, Ava I, Bce AI, Bsa HI, BisI, BstUI, BshI236I, AccII, BstFNI, McrBC, GlaI, MvnI, HpaII (HapII), HhaI, AciI, SmaI, HinP1I, HpyCH4IV, EagI and mixtures of two or more of the above enzymes. Preferred is a mixture containing the restriction enzymes BstUI, HpaII, HpyCH4IV and HinP1I.

[0176] In the fourth step, which is optional but a preferred embodiment, the restriction fragments are amplified. This is preferably carried out using a polymerase chain reaction, and said amplificates may carry suitable detectable labels as discussed above, namely fluorophore labels, radionuclides and mass labels. Particularly preferred is amplification by means of an amplification enzyme and at least two primers comprising, in each case a contiguous sequence at least 16 nucleotides in length that is complementary to, or hybridizes under moderately stringent or stringent conditions to a sequence selected from the group consisting SEQ ID NO: 1 to SEQ ID NO: 12; SEQ ID NO: 79 to SEQ ID NO: 83 and SEQ ID NO: 119 to SEQ ID NO: 125, and complements thereof. Preferably said contiguous sequence is at least 16, 20 or 25 nucleotides in length. In an alternative embodiment said primers may be complementary to any adaptors linked to the fragments.

[0177] In the fifth step the amplificates are detected. The detection may be by any means standard in the art, for example, but not limited to, gel electrophoresis analysis, hybridisation analysis, incorporation of detectable tags within the PCR products, DNA array analysis, MALDI or ESI analysis. Preferably said detection is carried out by hybridisation to at least one nucleic acid or peptide nucleic acid comprising in each case a contiguous sequence at least 16 nucleotides in length that is complementary to, or hybridizes under moderately stringent or stringent conditions to a sequence selected from the group consisting of SEQ ID NO: 1 to SEQ ID NO: 12; SEQ ID NO: 79 to SEQ ID NO: 83 and SEQ ID NO: 119 to SEQ ID NO: 125, and complements thereof. Preferably said contiguous sequence is at least 16, 20 or 25 nucleotides in length.

[0178] Subsequent to the determination of the methylation state or methylation level of the genomic nucleic acids obtained from a subject's sample, the risk or increased risk of a subject to suffer from a cell proliferative disorder, preferably those according to Table 2 (most preferably lung carcinoma), or the presence of such a cell proliferative disorder is deduced based upon the methylation state or level of at least one CpG dinucleotide sequence of SEQ ID NO: 1 to SEQ ID NO: 12; SEQ ID NO: 79 to SEQ ID NO: 83 and SEQ ID NO: 119 to SEQ ID NO: 125, or an average, or a value reflecting an average methylation state of a plurality of CpG dinucleotide sequences of SEQ ID NO: 1 to SEQ ID NO: 12; SEQ ID NO: 79 to SEQ ID NO: 83 and SEQ ID NO: 119 to SEQ ID NO: 125 wherein methylation is associated with the presence of cell proliferative disorders, preferably those according to Table 2 (most preferably lung carcinoma). Wherein said methylation is determined by quantitative means the cut-off point for determining said presence of methylation is preferably zero (i.e. wherein a sample displays any degree of methylation it is determined as having a methylated status at the analyzed CpG position). Nonetheless, it is foreseen that the person skilled in the art may wish to adjust said cut-off value in order to provide an assay of a particularly preferred sensitivity or specificity. Accordingly said cut-off value may be increased (thus increasing the specificity), said cut off value may be within a range selected form the group consisting of 0%-5%, 5%-10%, 10%-15%, 15%-20%, 20%-30% and 30%-50%. Particularly preferred are the cut-offs 10%, 15%, 25%, and 30%.

[0179] Upon determination of the methylation and/or expression of at least one gene or genomic sequence selected from the group consisting of PTGER4; RUNX1; EVX2; EVX-1; SHOX2; SEQ ID NO: 6; CN027; LRAT; IL-12RB1; TFAP2C; BCL2; ARIDA5A (SEQ ID NO: 12); EN2; PRDM14; SEQ ID NO: 81; ARID5A (SEQ ID NO: 82); VAX1; ONECUT1; FOXL-2, TFAP2E and BARHL2 (including promoter or regulatory elements thereof) and EN2-2, EN2-3 and SHOX2-2 the presence or absence of a cell proliferative disorder or an increased risk of a subject to suffer from a cell proliferative disorder, preferably those according to Table 2 (most preferably lung carcinoma) is determined, wherein hyper-methylation and/or under-expression indicates the presence of cell proliferative disorders and/or the presence of an increased risk of the subject to suffer from such a disorder, preferably those according to Table 2 (most preferably lung carcinoma) and hypo-methylation and/or over-expression indicates the absence of cell proliferative disorders within the subject, and/or the absence of an increased risk of the subject to suffer from such a disorder, preferably those according to Table 2 (most preferably lung carcinoma). It is particularly preferred that said proliferative disorder is a lung cancer selected from the group consisting of lung adenocarcinoma; large cell lung cancer; squamous cell lung carcinoma and small cell lung carcinoma.

[0180] An increased risk is to be understood as a risk that is at least two fold higher than the average risk of the population with the same gender in the same age group (wherein subjects belong to the same age group if they are not more than 5 years older or younger than the subject analysed). Wherein the specification refers to a risk, this risk is understood to be a higher risk or increased risk as defined above.

### Further Improvements

[0181] In certain aspects, the disclosed invention provides treated nucleic acids, derived from genomic SEQ ID NO: 1 to SEQ ID NO: 12; SEQ ID NO: 79 to SEQ ID NO: 83 and SEQ ID NO: 119 to SEQ ID NO: 125, wherein the treatment is suitable to convert at least one unmethylated cytosine base of the genomic DNA sequence to uracil or another base that is detectably dissimilar to cytosine in terms of hybridization. The genomic sequences in question may comprise one, or more consecutive methylated CpG positions. Said treatment preferably comprises use of a reagent selected from the group consisting of bisulfite, hydrogen sulfite, disulfite, and combinations thereof. Said treatment may however also comprise an appropriate enzymatic treatment (instead of the bisulfite treatment), resulting in conversion of the unmethylated cytosines into base pairs with a different base pairing behavious. In a preferred embodiment of the invention, the invention provides a non-naturally occurring modified nucleic acid comprising a sequence of at least 16 contiguous nucleotide bases in length of a sequence selected from the group consisting of SEQ ID NO: 13 to SEQ ID NO: 60; SEQ ID NO: 84 to SEQ ID NO: 103, SEQ ID NO: 126 TO SEQ ID NO: 153. In further preferred embodiments of the invention said nucleic acid is at least 50, 100, 150, 200, 250 or 500 base pairs in length of a segment of the nucleic acid sequence disclosed in SEQ ID NO: 13 to SEQ ID NO: 60; SEQ ID NO: 84 to SEQ ID NO: 103, SEQ ID NO: 126 to SEQ ID NO: 153. Particularly preferred is a nucleic acid molecule that is identical or complementary to all or a portion of the sequences SEQ ID NO: 13 to SEQ ID NO: 60; SEQ ID NO: 84 to SEQ ID NO: 103, SEQ ID NO: 126 to SEQ ID NO: 153 but not to SEQ ID NO: 1 to SEQ ID NO: 12; SEQ ID NO: 79 to SEQ ID NO: 83 and SEQ ID NO: 119 to SEQ ID NO: 125 or other naturally occurring DNA.

[0182] It is preferred that said sequence comprises at least one CpG, TpA or CpA dinucleotide and sequences complementary thereto. The sequences of SEQ ID NO: 13 to SEQ ID NO: 60; SEQ ID NO: 84 to SEQ ID NO: 103, SEQ ID NO: 126 TO SEQ ID NO: 153 provide non-naturally occurring modified versions of the nucleic acid according to SEQ ID NO: 1 to SEQ ID NO: 12; SEQ ID NO: 79 to SEQ ID NO: 83 and SEQ ID NO: 119 TO SEQ ID NO: 125, wherein the modification of each genomic sequence results in the synthesis of a nucleic acid having a sequence that is unique and distinct from said genomic sequence as follows. For each sense strand genomic DNA, e.g., SEQ ID NO: 1 to SEQ ID NO: 12; SEQ ID NO: 79 to SEQ ID NO: 83 and SEQ ID NO: 119 to SEQ ID NO: 125, four converted versions are disclosed. A first version wherein “C” is converted to “T,” but “CpG” remains “CpG” (i.e., corresponds to case where, for the genomic sequence, all “C” residues of CpG dinucleotide sequences are methylated and are thus not converted); a second version discloses the complement of the disclosed genomic DNA sequence (i.e. antisense strand), wherein “C” is converted to “T,” but “CpG” remains “CpG” (i.e., corresponds to case where, for all “C” residues of CpG dinucleotide sequences are methylated and are thus not converted). The ‘upmethylated’ converted sequences of SEQ ID NO: 1 to SEQ ID NO: 12; SEQ ID NO: 79 to SEQ ID NO: 83 and SEQ ID NO: 119 to SEQ ID NO: 125 correspond to SEQ ID NO: 13 & SEQ ID NO: 36; SEQ ID NO: 84 to SEQ ID NO: 93. A third chemically converted version of each genomic sequences is provided, wherein “C” is converted to “T” for all “C” residues, including those of “CpG” dinucleotide sequences (i.e., corresponds to case where, for the genomic sequences, all “C” residues of CpG dinucleotide sequences are unmethylated); a final chemically converted version of each sequence, discloses the complement of the disclosed genomic DNA sequence (i.e. antisense strand), wherein “C” is converted to “T” for all “C” residues, including those of “CpG” dinucleotide sequences (i.e., corresponds to case where, for the complement (antisense strand) of each genomic sequence, all “C” residues of CpG dinucleotide sequences are unmethylated). The ‘downmethylated’ converted sequences of SEQ ID NO: 1 to SEQ ID NO: 12; SEQ ID NO: 79 to SEQ ID NO: 83 and SEQ ID NO: 119 to SEQ ID NO: 125 corresponds to SEQ ID NO: 37 to SEQ ID NO: 60; SEQ ID NO: 84 to SEQ ID NO: 93.

[0183] Significantly, heretofore, the nucleic acid sequences and molecules according SEQ ID NO: 13 to SEQ ID NO: 60; SEQ ID NO: 84 to SEQ ID NO: 103, SEQ ID NO: 126 to SEQ ID NO: 153 were not implicated in or connected with the detection or diagnosis of cell proliferative disorders, preferably those according to Table 2 (most preferably lung carcinoma). It is particularly preferred that the cell proliferative disorder is a lung cancer selected from the group consisting of lung adenocarcinoma; large cell lung cancer; squamous cell lung carcinoma and small cell lung carcinoma.

[0184] In an alternative preferred embodiment, the invention further provides oligonucleotides or oligomers suitable for use in the methods of the invention for detecting the cytosine methylation state within genomic or treated (chemically modified) DNA, according to SEQ ID NO: 1 to SEQ ID NO: 60; SEQ ID NO: 79 to SEQ ID NO: 103; SEQ ID NO: 119 to SEQ ID NO: 148. Said oligonucleotide or oligomer nucleic acids provide novel diagnostic means. Said oligonucleotide or oligomer comprising a nucleic acid sequence having a length of at least nine (9) nucleotides which is identical to, hybridizes, under moderately stringent or stringent conditions (as defined herein above), to a treated nucleic acid sequence according to SEQ ID NO: 13 to SEQ ID NO: 60; SEQ ID NO: 84 to SEQ ID NO: 103, SEQ ID NO: 126 to SEQ ID NO: 153 and/or sequences complementary thereto, or to a genomic sequence according to SEQ ID NO: 1 to SEQ ID NO: 12; SEQ ID NO: 79 to SEQ ID NO: 83 and SEQ ID NO: 119 to SEQ ID NO: 125 and/or sequences complementary thereto.

[0185] Thus, the present invention includes nucleic acid molecules (e.g., oligonucleotides and peptide nucleic acid (PNA) molecules (PNA-oligomers)) that hybridize under moderately stringent and/or stringent hybridization conditions to all or a portion of the sequences SEQ ID NO: 1 to SEQ ID NO: 60; SEQ ID NO: 79 to SEQ ID NO: 103, SEQ ID NO: 119 TO SEQ ID NO: 148 or to the complements thereof. Particularly preferred is a nucleic acid molecule that hybridizes under moderately stringent and/or stringent hybridization conditions to all or a portion of the sequences SEQ ID NO: 13 to SEQ ID NO: 60; SEQ ID NO: 84 to SEQ ID NO: 103, SEQ ID NO: 126 to SEQ ID NO: 153 but not to SEQ ID NO: 1 to SEQ ID NO: 12; SEQ ID NO: 79 to SEQ ID NO: 83 and SEQ ID NO: 119 to SEQ ID NO: 125 or other human genomic DNA.

[0186] The identical or hybridizing portion of the hybridizing nucleic acids is typically at least 9, 16, 20, 25, 30 or 35 nucleotides in length. However, longer molecules have inventive utility, and are thus within the scope of the present invention.

[0187] Preferably, the hybridizing portion of the inventive hybridizing nucleic acids is at least 95%, or at least 98%, or 100% identical to the sequence, or to a portion thereof of SEQ ID NO: 13 to SEQ ID NO: 60; SEQ ID NO: 84 to SEQ ID NO: 103, SEQ ID NO: 126 to SEQ ID NO: 153, or to the complements thereof.

[0188] Hybridizing nucleic acids of the type described herein can be used, for example, as a primer (e.g., a PCR primer), or a diagnostic probe or primer. Preferably, hybridization of the oligonucleotide probe to a nucleic acid sample is performed under stringent conditions and the probe is 100% identical to the target sequence. Nucleic acid duplex or hybrid stability is expressed as the melting temperature or Tm, which is the temperature at which a probe dissociates from a target DNA. This melting temperature is used to define the required stringency conditions.

[0189] For target sequences that are related and substantially identical to the corresponding sequence of SEQ ID NO: 1 to SEQ ID NO: 12; SEQ ID NO: 79 to SEQ ID NO: 83 and SEQ ID NO: 119 to SEQ ID NO: 125 (such as allelic variants and SNPs), rather than identical, it is useful to first establish the lowest temperature at which only homologous hybridization occurs with a particular concentration of salt (e.g., SSC or SSPE). Then, assuming that 1% mismatching results in a 1° C. decrease in the Tm, the temperature of the final wash in the hybridization reaction is reduced accordingly (for example, if sequences having >95% identity with the probe are sought, the final wash temperature is decreased by 5° C.). In practice, the change in Tm can be between 0.5° C. and 1.5° C. per 1% mismatch.

[0190] Examples of inventive oligonucleotides of length X (in nucleotides), as indicated by polynucleotide positions with reference to, e.g., SEQ ID NO: 1, include those corresponding to sets (sense and antisense sets) of consecutively overlapping oligonucleotides of length X, where the oligonucleotides within each consecutively overlapping set (corresponding to a given X value) are defined as the finite set of Z oligonucleotides from nucleotide positions:

[0191] n to (n+(X−1));

[0192] where n=1, 2, 3, . . . (Y−(X−1));

[0193] where Y equals the length (nucleotides or base pairs) of SEQ ID NO: 1 (3905);

[0194] where X equals the common length (in nucleotides) of each oligonucleotide in the set (e.g., X=20 for a set of consecutively overlapping 20-mers); and

[0195] where the number (Z) of consecutively overlapping oligomers of length X for a given SEQ ID NO 1 of length Y is equal to Y−(X−1). For example Z=3905−19=3886 for either sense or antisense sets of SEQ ID NO: 1, where X=20.

[0196] Preferably, the set is limited to those oligomers that comprise at least one CpG, TpG or CpA dinucleotide, and thus hybridise in any case to a region of the converted target DNA, that comprises at least one (methylated or unmethylated) CpG in its unconverted version.

[0197] Examples of inventive 20-mer oligonucleotides include the following set of 3905 oligomers (and the antisense set complementary thereto), indicated by polynucleotide positions with reference to SEQ ID NO: 1:

1-20, 2-21, 3-22, 4-23, 5-24, . . . and 3886-3905

[0198] Preferably, the set is limited to those oligomers that comprise at least one CpG, TpG or CpA dinucleotide and thus hybridise in any case to a region of the converted target DNA, that comprises at least one (methylated or unmethylated) CpG in its unconverted version.

[0199] Likewise, examples of inventive 25-mer oligonucleotides include the following set of 3881 oligomers (and the antisense set complementary thereto), indicated by polynucleotide positions with reference to SEQ ID NO: 1:

[0200] 1-25, 2-26, 3-27, 4-28, 5-29, . . . and 3881-3905.

[0201] Preferably, the set is limited to those oligomers that comprise at least one CpG, TpG or CpA dinucleotide and thus hybridise in any case to a region of the converted target DNA, that comprises at least one (methylated or unmethylated) CpG in its unconverted version.

[0202] The present invention encompasses, for each of SEQ ID NO: 1 to SEQ ID NO: 60; SEQ ID NO: 79 to SEQ ID NO: 103, SEQ ID NO: 119 TO SEQ ID NO: 148 (sense and antisense), multiple consecutively overlapping sets of oligonucleotides or modified oligonucleotides of length X, where, e.g., X=9, 10, 17, 20, 22, 23, 25, 27, 30 or 35 nucleotides.

[0203] The oligonucleotides or oligomers according to the present invention constitute effective tools useful to ascertain genetic and epigenetic parameters of the genomic sequence corresponding to SEQ ID NO: 1 to SEQ ID NO: 12; SEQ ID NO: 79 to SEQ ID NO: 83 and SEQ ID NO: 119 to SEQ ID NO: 125. Preferred sets of such oligonucleotides or modified oligonucleotides of length X are those consecutively overlapping sets of oligomers corresponding to SEQ ID NO: 1 to SEQ ID NO: 60; SEQ ID NO: 79 to SEQ ID NO: 103, SEQ ID NO: 119 TO SEQ ID NO: 148 (and to the complements thereof). Preferably, said oligomers comprise at least one CpG, TpG or CpA dinucleotide and thus hybridise in any case to a region of the converted target DNA, that comprises at least one (methylated or unmethylated) CpG in its unconverted version.

[0204] Particularly preferred oligonucleotides or oligomers according to the present invention are those in which the cytosine of the CpG dinucleotide (or of the corresponding converted TpG or CpA dinucleotide) sequences is within the middle third of the oligonucleotide; that is, where the oligonucleotide is, for example, 13 bases in length, the CpG, TpG or CpA dinucleotide is positioned within the fifth to ninth nucleotide from the 5′-end.

[0205] The oligonucleotides of the invention can also be modified by chemically linking the oligonucleotide to one or more moieties or conjugates to enhance the activity, stability or detection of the oligonucleotide. Such moieties or conjugates include chromophores, fluorophores, lipids such as cholesterol, cholic acid, thioether, aliphatic chains, phospholipids, polyamines, polyethylene glycol (PEG), palmityl moieties, and others as disclosed in, for example, U.S. Pat. Nos. 5,514,758, 5,565,552, 5,567,810, 5,574,142, 5,585,481, 5,587,371, 5,597,696 and 5,958,773. The probes may also exist in the form of a PNA (peptide nucleic acid) which has particularly preferred pairing properties. Thus, the oligonucleotide may include other appended groups such as peptides, and may include hybridization-triggered cleavage agents (Krol et al., BioTechniques 6:958-976, 1988) or intercalating agents (Zon, Pharm. Res. 5:539-549, 1988). To this end, the oligonucleotide may be conjugated to another molecule, e.g., a chromophore, fluorophore, peptide, hybridization-triggered cross-linking agent, transport agent, hybridization-triggered cleavage agent, etc.

[0206] The oligonucleotide may also comprise at least one art-recognized modified sugar and/or base moiety, or may comprise a modified backbone or non-natural internucleoside linkage.

[0207] The oligonucleotides or oligomers according to particular embodiments of the present invention are typically used in ‘sets,’ which contain at least one oligomer for analysis of each of the CpG dinucleotides of a genomic sequence or parts thereof selected from the group consisting of SEQ ID NO: 1 to SEQ ID NO: 12; SEQ ID NO: 79 to SEQ ID NO: 83 and SEQ ID NO: 119 to SEQ ID NO: 125 and sequences complementary thereto, or to the corresponding CpG, TpG or CpA dinucleotide within a sequence of the treated nucleic acids according to SEQ ID NO: 13 to SEQ ID NO: 60; SEQ ID NO: 84 to SEQ ID NO: 103, SEQ ID NO: 126 to SEQ ID NO: 153 and sequences complementary thereto. However, it is anticipated that for economic or other factors it may be preferable to analyse a limited selection of the CpG dinucleotides within said sequences, and the content of the set of oligonucleotides is altered accordingly.

[0208] Therefore, in particular embodiments, the present invention provides a set of at least two (2) (oligonucleotides and/or PNA-oligomers) useful for detecting the cytosine methylation state in treated genomic DNA (SEQ ID NO: 13 to SEQ ID NO: 60; SEQ ID NO: 84 to SEQ ID NO: 103, SEQ ID NO: 126 to SEQ ID NO: 153), or in genomic DNA (SEQ ID NO: 1 to SEQ ID NO: 12; SEQ ID NO: 79 to SEQ ID NO: 83 and SEQ ID NO: 119 to SEQ ID NO: 125 and sequences complementary thereto). These probes enable diagnosis and detection of cell proliferative disorders, preferably those according to Table 2 (most preferably lung carcinoma). It is particularly preferred that it is a lung cancer selected from the group consisting of lung adenocarcinoma; large cell lung cancer; squamous cell lung carcinoma and small cell lung carcinoma. The set of oligomers may also be used for detecting single nucleotide polymorphisms (SNPs) in treated genomic DNA (SEQ ID NO: 13 to SEQ ID NO: 60; SEQ ID NO: 84 to SEQ ID NO: 103, SEQ ID NO: 126 to SEQ ID NO: 153), or in genomic DNA (SEQ ID NO: 1 to SEQ ID NO: 12; SEQ ID NO: 79 to SEQ ID NO: 83 and SEQ ID NO: 119 to SEQ ID NO: 125 and sequences complementary thereto).

[0209] In preferred embodiments, at least one, and more preferably all members of a set of oligonucleotides is bound to a solid phase.

[0210] In further embodiments, the present invention provides a set of at least two (2) oligonucleotides that are used as ‘primer’ oligonucleotides for amplifying DNA sequences of one of SEQ ID NO: 1 to SEQ ID NO: 60; SEQ ID NO: 79 to SEQ ID NO: 103, SEQ ID NO: 119 TO SEQ ID NO: 148 and sequences complementary thereto, or segments thereof.

[0211] It is anticipated that the oligonucleotides may constitute all or part of an “array” or “DNA chip” (i.e., an arrangement of different oligonucleotides and/or PNA-oligomers bound to a solid phase). Such an array of different oligonucleotide- and/or PNA-oligomer sequences can be characterized, for example, in that it is arranged on the solid phase in the form of a rectangular or hexagonal lattice. The solid-phase surface may be composed of silicon, glass, polystyrene, aluminium, steel, iron, copper, nickel, silver, or gold. Nitrocellulose as well as plastics such as nylon, which can exist in the form of pellets or also as resin matrices, may also be used. An overview of the Prior Art in oligomer array manufacturing can be gathered from a special edition of Nature Genetics (Nature Genetics Supplement, Volume 21, January 1999, and from the literature cited therein). Fluorescently labelled probes are often used for the scanning of immobilized DNA arrays. The simple attachment of Cy3 and Cy5 dyes to the 5′-OH of the specific probe are particularly suitable for fluorescence labels. The detection of the fluorescence of the hybridised probes may be carried out, for example, via a confocal microscope. Cy3 and Cy5 dyes, besides many others, are commercially available.

[0212] It is also anticipated that the oligonucleotides, or particular sequences thereof, may constitute all or part of an “virtual array” wherein the oligonucleotides, or particular sequences thereof, are used, for example, as ‘specifiers’ as part of, or in combination with a diverse population of unique labeled probes to analyze a complex mixture of analytes. Such a method, for example is described in US 2003/0013091 (U.S. Ser. No. 09/898,743, published 16 Jan. 2003), which is hereby incorporated by reference. In such methods, enough labels are generated so that each nucleic acid in the complex mixture (i.e., each analyte) can be uniquely bound by a unique label and thus detected (each label is directly counted, resulting in a digital read-out of each molecular species in the mixture).

[0213] It is particularly preferred that the oligomers according to the invention are utilised for detecting, or for diagnosing cell proliferative disorders, preferably those according to Table 2 (most preferably lung carcinoma) or for detecting the presence or absence of an increased risk of a subject to suffer from a cell proliferative disorder, preferably those according to Table 2 (most preferably lung carcinoma). It is particularly preferred that the disorder is a lung cancer and that it is selected from the group consisting of lung adenocarcinoma; large cell lung cancer; squamous cell lung carcinoma and small cell lung carcinoma.

### Kits

[0214] Moreover, additional aspects of the present invention provide a kit, comprising: a means for determining the expression or methylation status or levels of at least one gene or genomic sequence selected from the group consisting of PTGER4; RUNX1; EVX2; EVX-1; SHOX2; SEQ ID NO: 6; CN027; LRAT; IL-12RB1; TFAP2C; BCL2; ARIDA5A (SEQ ID NO: 12); EN2; PRDM14; SEQ ID NO: 81; ARID5A (SEQ ID NO: 82); VAX1; ONECUT1; FOXL-2, TFAP2E and BARHL2 (including promoter or regulatory elements thereof) and EN2-2, EN2-3 and SHOX2-2. The means for determining the expression or methylation status or levels of at least one gene or genomic sequence selected from the group consisting of PTGER4; RUNX1; EVX2; EVX-1; SHOX2; SEQ ID NO: 6; CN027; LRAT; IL-12RB1; TFAP2C; BCL2; ARIDA5A (SEQ ID NO: 12); EN2; PRDM14; SEQ ID NO: 81; ARID5A (SEQ ID NO: 82); VAX1; ONECUT1; FOXL-2, TFAP2E and BARHL2 (including promoter or regulatory elements thereof) and EN2-2, EN2-3 and SHOX2-2 preferably comprise a bisulfite-containing reagent; one or a plurality of oligonucleotides wherein the sequences thereof are identical, are complementary, or hybridise under stringent or highly stringent conditions to a 9 or more preferably 18 base long segment of a sequence selected from SEQ ID NO: 13 to SEQ ID NO: 60; SEQ ID NO: 84 to SEQ ID NO: 103, SEQ ID NO: 126 to SEQ ID NO: 153; and optionally instructions for carrying out and evaluating the described method of methylation analysis. In one embodiment the base sequence of said oligonucleotides comprises at least one CpG, CpA or TpG dinucleotide.

[0215] In further embodiments, said kit may further comprise standard reagents for performing a CpG position-specific methylation analysis, wherein said analysis comprises one or more of the following techniques: MS-SNuPE, MSP, MethyLight™, HeavyMethyl, COBRA, and nucleic acid sequencing. However, a kit along the lines of the present invention can also contain only part of the aforementioned components.

[0216] In preferred embodiments, the kit may comprise additional bisulfite conversion reagents selected from the group consisting: DNA denaturation buffer; sulfonation buffer; DNA recovery reagents or kits (e.g., precipitation, ultrafiltration, affinity column); desulfonation buffer; and DNA recovery components.

[0217] In yet further alternative embodiments, the kit may contain, packaged in separate containers, a polymerase and a reaction buffer optimised for primer extension mediated by the polymerase, such as PCR. In another embodiment of the invention the kit further comprising means for obtaining a biological sample of the patient. Preferred is a kit, which further comprises a container suitable for containing the means for determining methylation of at least one gene or genomic sequence selected from the group consisting of PTGER4; RUNX1; EVX2; EVX-1; SHOX2; SEQ ID NO: 6; CN027; LRAT; IL-12RB1; TFAP2C; BCL2; ARIDA5A (SEQ ID NO: 12); EN2; PRDM14; SEQ ID NO: 81; ARID5A (SEQ ID NO: 82); VAX1; ONECUT1; FOXL-2, TFAP2E and BARHL2 (including promoter or regulatory elements thereof) and EN2-2, EN2-3 and SHOX2-2 in the biological sample of the patient, and most preferably further comprises instructions for use and interpretation of the kit results. In a preferred embodiment the kit comprises: (a) a bisulfite reagent; (b) a container suitable for containing the said bisulfite reagent and the biological sample of the patient; (c) at least one set of primer oligonucleotides containing two oligonucleotides whose sequences in each case are identical, are complementary, or hybridise under stringent or highly stringent conditions to a 9 or more preferably 18 base long segment of a sequence selected from SEQ ID NO: 13 to SEQ ID NO: 60; SEQ ID NO: 84 to SEQ ID NO: 103, SEQ ID NO: 126 to SEQ ID NO: 153; and optionally (d) instructions for use and interpretation of the kit results. In an alternative preferred embodiment the kit comprises: (a) a bisulfite reagent; (b) a container suitable for containing the said bisulfite reagent and the biological sample of the patient; (c) at least one oligonucleotides and/or PNA-oligomer having a length of at least 9 or 16 nucleotides which is identical to or hybridises to a pre-treated nucleic acid sequence according to one of SEQ ID NO: 13 to SEQ ID NO: 60; SEQ ID NO: 84 to SEQ ID NO: 103, SEQ ID NO: 126 to SEQ ID NO: 153 and sequences complementary thereto; and optionally (d) instructions for use and interpretation of the kit results.

[0218] In alternative embodiments, the kit comprises: (a) a bisulfite reagent; (b) a container suitable for containing the said bisulfite reagent and the biological sample of the patient; (c) at least one set of primer oligonucleotides containing two oligonucleotides whose sequences in each case are identical, are complementary, or hybridise under stringent or highly stringent conditions to a 9 or more preferably 18 base long segment of a sequence selected from SEQ ID NO: 13 to SEQ ID NO: 60; SEQ ID NO: 84 to SEQ ID NO: 103, SEQ ID NO: 126 to SEQ ID NO: 153; (d) at least one oligonucleotides and/or PNA-oligomer having a length of at least 9 or 16 nucleotides which is identical to or hybridises to a pre-treated nucleic acid sequence according to one of SEQ ID NO: 13 to SEQ ID NO: 60; SEQ ID NO: 84 to SEQ ID NO: 103, SEQ ID NO: 126 to SEQ ID NO: 153 and sequences complementary thereto; and optionally (e) instructions for use and interpretation of the kit results.

[0219] The kits may also contain other components such as buffers or solutions suitable for blocking, washing or coating, packaged in a separate container.

[0220] Additional aspects of the invention provide a kit for use in determining the presence of and/or diagnosing cell proliferative disorders, preferably those according to Table 2 (most preferably lung carcinoma). Particularly preferred is a lung cancer selected from the group consisting of lung adenocarcinoma; large cell lung cancer; squamous cell lung carcinoma; small cell lung carcinoma.

[0221] Said kits preferably comprise: a means for measuring the level of transcription of at least one gene or genomic sequence selected from the group consisting of PTGER4; RUNX1; EVX2; EVX-1; SHOX2; SEQ ID NO: 6; CN027; LRAT; IL-12RB1; TFAP2C; BCL2; ARIDA5A (SEQ ID NO: 12); EN2; PRDM14; SEQ ID NO: 81; ARID5A (SEQ ID NO: 82); VAX1; ONECUT1; FOXL-2, TFAP2E and BARHL2 and a means for determining methylation status or level of at least one gene or genomic sequence selected from the group consisting of PTGER4; RUNX1; EVX2; EVX-1; SHOX2; SEQ ID NO: 6; CN027; LRAT; IL-12RB1; TFAP2C; BCL2; ARIDA5A (SEQ ID NO: 12); EN2; PRDM14; SEQ ID NO: 81; ARID5A (SEQ ID NO: 82); VAX1; ONECUT1; FOXL-2, TFAP2E and BARHL2 (including promoter or regulatory elements thereof) and EN2-2, EN2-3 and SHOX2-2.

[0222] Typical reagents (e.g., as might be found in a typical COBRA™-based kit) for COBRA™ analysis may include, but are not limited to: PCR primers for at least one gene or genomic sequence selected from the group consisting of PTGER4; RUNX1; EVX2; EVX-1; SHOX2; SEQ ID NO: 6; CN027; LRAT; IL-12RB1; TFAP2C; BCL2; ARIDA5A (SEQ ID NO: 12); EN2; PRDM14; SEQ ID NO: 81; ARID5A (SEQ ID NO: 82); VAX1; ONECUT1; FOXL-2, TFAP2E and BARHL2 (including promoter or regulatory elements thereof) and EN2-2, EN2-3 and SHOX2-2 and/or their bisulfite converted sequences; restriction enzyme and appropriate buffer; gene-hybridization oligo; control hybridization oligo; kinase labeling kit for oligo probe; and labeled nucleotides. Typical reagents (e.g., as might be found in a typical MethyLig [symbol] t™-based kit) for MethyLig [symbol] t™ analysis may include, but are not limited to: PCR primers for the bisulfite converted sequence of at least one gene or genomic sequence selected from the group consisting of PTGER4; RUNX1; EVX2; EVX-1; SHOX2; SEQ ID NO: 6; CN027; LRAT; IL-12RB1; TFAP2C; BCL2; ARIDA5A (SEQ ID NO: 12); EN2; PRDM14; SEQ ID NO: 81; ARID5A (SEQ ID NO: 82); VAX1; ONECUT1; FOXL-2, TFAP2E and BARHL2 (including promoter or regulatory elements thereof) and EN2-2, EN2-3 and SHOX2-2; bisulfite specific probes (e.g. TaqMan™ or Lightcycler™); optimized PCR buffers and deoxynucleotides; and Taq polymerase.

[0223] Typical reagents (e.g., as might be found in a typical Ms-SNuPE™-based kit) for Ms-SNuPE™ analysis may include, but are not limited to: PCR primers for specific gene (or bisulfite treated DNA sequence or CpG island); optimized PCR buffers and deoxynucleotides; gel extraction kit; positive control primers; Ms-SNuPE™ primers for the bisulfite converted sequence of at least one gene or genomic sequence selected from the group consisting of PTGER4; RUNX1; EVX2; EVX-1; SHOX2; SEQ ID NO: 6; CN027; LRAT; IL-12RB1; TFAP2C; BCL2; ARIDA5A (SEQ ID NO: 12); EN2; PRDM14; SEQ ID NO: 81; ARID5A (SEQ ID NO: 82); VAX1; ONECUT1; FOXL-2, TFAP2E and BARHL2 (including promoter or regulatory elements thereof) and EN2-2, EN2-3 and SHOX2-2; reaction buffer (for the Ms-SNuPE reaction); and labelled nucleotides.

[0224] Typical reagents (e.g., as might be found in a typical MSP-based kit) for MSP analysis may include, but are not limited to: methylation-specific and unmethylation-specific PCR primers for the bisulfite converted sequence of at least one gene or genomic sequence selected from the group consisting of PTGER4; RUNX1; EVX2; EVX-1; SHOX2; SEQ ID NO: 6; CN027; LRAT; IL-12RB1; TFAP2C; BCL2; ARIDA5A (SEQ ID NO: 12); EN2; PRDM14; SEQ ID NO: 81; ARID5A (SEQ ID NO: 82); VAX1; ONECUT1; FOXL-2, TFAP2E and BARHL2 (including promoter or regulatory elements thereof) and EN2-2, EN2-3 and SHOX2-2, optimized PCR buffers and deoxynucleotides, and specific probes.

[0225] Moreover, an additional aspect of the present invention is an alternative kit comprising a means for determining methylation (status or level) of at least one gene or genomic sequence selected from the group consisting of PTGER4; RUNX1; EVX2; EVX-1; SHOX2; SEQ ID NO: 6; CN027; LRAT; IL-12RB1; TFAP2C; BCL2; ARIDA5A (SEQ ID NO: 12); EN2; PRDM14; SEQ ID NO: 81; ARID5A (SEQ ID NO: 82); VAX1; ONECUT1; FOXL-2, TFAP2E and BARHL2 (including promoter or regulatory elements thereof) and EN2-2, EN2-3 and SHOX2-2, wherein said means comprise preferably at least one methylation specific restriction enzyme; one or a plurality of primer oligonucleotides (preferably one or a plurality of primer pairs) suitable for the amplification of a sequence comprising at least one CpG dinucleotide of a sequence selected from SEQ ID NO: 1 to SEQ ID NO: 12; SEQ ID NO: 79 to SEQ ID NO: 83; SEQ ID NO: 119 to SEQ ID NO: 125 and optionally instructions for carrying out and evaluating the described method of methylation analysis. In one embodiment the base sequence of said oligonucleotides are identical, are complementary, or hybridise under stringent or highly stringent conditions to an at least 18 base long segment of a sequence selected from SEQ ID NO: 1 to SEQ ID NO: 12; SEQ ID NO: 79 to SEQ ID NO: 83 and SEQ ID NO: 119 to SEQ ID NO: 125.

[0226] In further embodiments, said kit may comprise one or a plurality of oligonucleotide probes for the analysis of the digest fragments, preferably said oligonucleotides are identical, are complementary, or hybridise under stringent or highly stringent conditions to an at least 16 base long segment of a sequence selected from SEQ ID NO: 1 to SEQ ID NO: 12; SEQ ID NO: 79 to SEQ ID NO: 83 and SEQ ID NO: 119 to SEQ ID NO: 125.

[0227] In preferred embodiments, the kit may comprise additional reagents selected from the group consisting: buffer (e.g. restriction enzyme, PCR, storage or washing buffers); DNA recovery reagents or kits (e.g., precipitation, ultrafiltration, affinity column) and DNA recovery components.

[0228] In a further alternative embodiment, the kit may contain, packaged in separate containers, a polymerase and a reaction buffer optimised for primer extension mediated by the polymerase, such as PCR. In another embodiment of the invention the kit further comprising means for obtaining a biological sample of the patient. In a preferred embodiment the kit comprises: (a) a methylation sensitive restriction enzyme reagent; (b) a container suitable for containing the said reagent and the biological sample of the patient; (c) at least one set of oligonucleotides one or a plurality of nucleic acids or peptide nucleic acids which are identical, are complementary, or hybridise under stringent or highly stringent conditions to an at least 9 base long segment of a sequence selected from SEQ ID NO: 1 to SEQ ID NO: 12; SEQ ID NO: 79 to SEQ ID NO: 83; SEQ ID NO: 119 to SEQ ID NO: 125 and optionally (d) instructions for use and interpretation of the kit results.

[0229] In an alternative preferred embodiment the kit comprises: (a) a methylation sensitive restriction enzyme reagent; (b) a container suitable for containing the said reagent and the biological sample of the patient; (c) at least one set of primer oligonucleotides suitable for the amplification of a sequence comprising at least one CpG dinucleotide of a sequence selected from SEQ ID NO: 1 to SEQ ID NO: 12; SEQ ID NO: 79 to SEQ ID NO: 83; SEQ ID NO: 119 to SEQ ID NO: 125 and optionally (d) instructions for use and interpretation of the kit results.

[0230] In an alternative embodiment the kit comprises: (a) a methylation sensitive restriction enzyme reagent; (b) a container suitable for containing the said reagent and the biological sample of the patient; (c) at least one set of primer oligonucleotides suitable for the amplification of a sequence comprising at least one CpG dinucleotide of a sequence selected from SEQ ID NO: 1 to SEQ ID NO: 12; SEQ ID NO: 79 to SEQ ID NO: 83; SEQ ID NO: 119 to SEQ ID NO: 125 (d) at least one set of oligonucleotides one or a plurality of nucleic acids or peptide nucleic acids which are identical, are complementary, or hybridise under stringent or highly stringent conditions to an at least 9 base long segment of a sequence selected from SEQ ID NO: 1 to SEQ ID NO: 12; SEQ ID NO: 79 to SEQ ID NO: 83 and SEQ ID NO: 119 to SEQ ID NO: 125 and optionally (e) instructions for use and interpretation of the kit results.

[0231] The kit may also contain other components such as buffers or solutions suitable for blocking, washing or coating, packaged in a separate container.

[0232] The invention further relates to a kit for use in providing a diagnosis of the presence or absence of cell proliferative disorders, preferably those according to Table 2 (most preferably lung carcinoma), in a subject by means of methylation-sensitive restriction enzyme analysis. Said kit comprises a container and a DNA microarray component. Said DNA microarray component being a surface upon which a plurality of oligonucleotides are immobilized at designated positions and wherein the oligonucleotide comprises at least one CpG methylation site. At least one of said oligonucleotides is specific for at least one gene or genomic sequence selected from the group consisting of PTGER4; RUNX1; EVX2; EVX-1; SHOX2; SEQ ID NO: 6; CN027; LRAT; IL-12RB1; TFAP2C; BCL2; ARIDA5A (SEQ ID NO: 12); EN2; PRDM14; SEQ ID NO: 81; ARID5A (SEQ ID NO: 82); VAX1; ONECUT1; FOXL-2, TFAP2E and BARHL2 (including promoter or regulatory elements thereof) and EN2-2, EN2-3 and SHOX2-2 and comprises a sequence of at least 15 base pairs in length but no more than 200 bp of a sequence according to one of SEQ ID NO: 1 to SEQ ID NO: 12; SEQ ID NO: 79 to SEQ ID NO: 83 and SEQ ID NO: 119 to SEQ ID NO: 125. Preferably said sequence is at least 15 base pairs in length but no more than 80 bp of a sequence according to one of SEQ ID NO: 1 to SEQ ID NO: 12; SEQ ID NO: 79 to SEQ ID NO: 83 and SEQ ID NO: 119 to SEQ ID NO: 125. It is further preferred that said sequence is at least 20 base pairs in length but no more than 30 bp of a sequence according to one of SEQ ID NO: 1 to SEQ ID NO: 12; SEQ ID NO: 79 to SEQ ID NO: 83 and SEQ ID NO: 119 to SEQ ID NO: 125.

[0233] Said test kit preferably further comprises a restriction enzyme component comprising one or a plurality of methylation-sensitive restriction enzymes.

[0234] In a further embodiment said test kit is further characterized in that it comprises at least one methylation-specific restriction enzyme, and wherein the oligonucleotides comprise a restriction site of said at least one methylation specific restriction enzymes.

[0235] The kit may further comprise one or several of the following components, which are known in the art for DNA enrichment: a protein component, said protein binding selectively to methylated DNA; a triplex-forming nucleic acid component, one or a plurality of linkers, optionally in a suitable solution; substances or solutions for performing a ligation e.g. ligases, buffers; substances or solutions for performing a column chromatography; substances or solutions for performing an immunology based enrichment (e.g. immunoprecipitation); substances or solutions for performing a nucleic acid amplification e.g. PCR; a dye or several dyes, if applicable with a coupling reagent, if applicable in a solution; substances or solutions for performing a hybridization; and/or substances or solutions for performing a washing step.

[0236] The described invention further provides a composition of matter useful for detecting, or for diagnosing cell proliferative disorders, preferably those according to Table 2 (most preferably lung carcinoma). Particularly preferred is a lung cancer selected from the group consisting of lung adenocarcinoma; large cell lung cancer; squamous cell lung carcinoma; small cell lung carcinoma.

[0237] Said composition preferably comprises at least one nucleic acid 18 base pairs in length of a segment of the nucleic acid sequence disclosed in SEQ ID NO: 13 to SEQ ID NO: 60; SEQ ID NO: 84 to SEQ ID NO: 103, SEQ ID NO: 126 to SEQ ID NO: 153, and one or more substances taken from the group comprising: 1-5 mM Magnesium Chloride, 100-500 μM dNTP, 0.5-5 units of taq polymerase, bovine serum albumen, an oligomer in particular an oligonucleotide or peptide nucleic acid (PNA)-oligomer, said oligomer comprising in each case at least one base sequence having a length of at least 9 nucleotides which is complementary to, or hybridizes under moderately stringent or stringent conditions to a pretreated genomic DNA according to one of the SEQ ID NO: 13 to SEQ ID NO: 60; SEQ ID NO: 84 to SEQ ID NO: 103, SEQ ID NO: 126 to SEQ ID NO: 153 and sequences complementary thereto. It is preferred that said composition of matter comprises a buffer solution appropriate for the stabilization of said nucleic acid in an aqueous solution and enabling polymerase based reactions within said solution. Suitable buffers are known in the art and commercially available.

[0238] In further preferred embodiments of the invention said at least one nucleic acid is at least 50, 100, 150, 200, 250 or 500 base pairs in length of a segment of the nucleic acid sequence disclosed in SEQ ID NO: 13 to SEQ ID NO: 60; SEQ ID NO: 84 to SEQ ID NO: 103, SEQ ID NO: 126 to SEQ ID NO: 153.

TABLE 1

| | | Pretreated | Pretreated | Pretreated | Pretreated |
|---|---|---|---|---|---|
| | | methylated | methylated | unmethylated | unmethylated |
| | | sequence | strand | sequence | sequence |
| | Genomic | (sense) | (antisense) | (sense) | (antisense) |
| Gene | SEQ ID NO: | SEQ ID NO: | SEQ ID NO: | SEQ ID NO: | SEQ ID NO: |
| RUNX1 | 1 | 13 | 14 | 37 | 38 |
| EVX-2 | 2 | 15 | 16 | 39 | 40 |
| EVX-1 | 3 | 17 | 18 | 41 | 42 |
| PTGER4 | 4 | 19 | 20 | 43 | 44 |
| SHOX2 | 5 | 21 | 22 | 45 | 46 |
| No | 6 | 23 | 24 | 47 | 48 |
| annotated | | | | | |
| gene, | | | | | |
| sequence | | | | | |
| located | | | | | |
| between | | | | | |
| TIM14 & | | | | | |
| SOX-2 | | | | | |
| genes | | | | | |
| CN027 | 7 | 25 | 26 | 49 | 50 |
| LRAT | 8 | 27 | 28 | 51 | 52 |
| IL-12RB1 | 9 | 29 | 30 | 53 | 54 |
| TFAP2C | 10 | 31 | 32 | 55 | 56 |
| BCL2 | 11 | 33 | 34 | 57 | 58 |
| ARID5A | 12 | 35 | 36 | 59 | 60 |
| Homeobox | 79 | 84 | 85 | 94 | 95 |
| protein | | | | | |
| engrailed-2 | | | | | |
| (Hu-En-2); | | | | | |
| EN2; HME2 | | | | | |
| PR domain | 80 | 86 | 87 | 96 | 97 |
| zinc finger | | | | | |
| protein 14 | | | | | |
| (PR domain- | | | | | |
| containing | | | | | |
| protein 14); | | | | | |
| PRDM14 | | | | | |
| Chromosomal | 81 | 88 | 89 | 98 | 99 |
| location | | | | | |
| (NCBI36) | | | | | |
| chromosome: | | | | | |
| 15 | | | | | |
| bp45139161 | | | | | |
| to 45139783 | | | | | |
| AT rich | 82 | 90 | 91 | 100 | 101 |
| interactive | | | | | |
| domain 5A; | | | | | |
| ARID5A | | | | | |
| Ventral | 83 | 92 | 93 | 102 | 103 |
| anterior | | | | | |
| homeobox 1; | | | | | |
| VAX1 | | | | | |
| SHOX2-2 | 119 | 126 | 127 | 140 | 141 |
| EN2-2 | 120 | 128 | 129 | 142 | 143 |
| EN2-3 | 121 | 130 | 131 | 144 | 145 |
| ONECUT 1 | 122 | 132 | 133 | 146 | 147 |
| FOXL2 | 123 | 134 | 135 | 148 | 149 |
| TFAP2E | 124 | 136 | 137 | 150 | 151 |
| BARHL2 | 125 | 138 | 139 | 152 | 153 |

TABLE 2

| Gene | Preferred disorder |
|---|---|
| RUNX1 | Cancers, preferably lung, |
| | prostate and/or breast |
| EVX2 | Cancers, preferably lung |
| EVX-1 | Cancers |
| PTGER4 | Cancers, preferably lung, |
| | prostate and/or breast |
| SHOX2 | Cancers, preferably lung, |
| | breast and/or bladder |
| none; upstream: TIM14/downstream: | Cancers, preferably prostate |
| SOX-2 (referred to as SEQ ID NO 6) | |
| CN027 | Cancers, preferably lung |
| | and/or prostate |
| LRAT | Cancers, preferably colon |
| IL-12RB1 | Cancers, preferably prostate |
| | and/or breast |
| TFAP2C | Cancers |
| BCL2 | Cancers, preferably lung |
| AT rich interactive domain 5A; ARID5A | Cancers, preferably lung |
| (according to SEQ ID NO 12) | |
| Homeobox protein engrailed-2 (Hu-En-2); | Cancers, preferably lung |
| EN2; HME2 | |
| PR domain zinc finger protein 14 (PR | Cancers, preferably lung |
| domain-containing protein 14); PRDM14 | |
| Chromosomal location (NCBI36) | Cancers, preferably lung |
| chromosome: 15 bp45139161 to 45139783 | |
| (referred to as SEQ ID NO 81) | |
| AT rich interactive domain 5A; ARID5A | Cancers, preferably lung |
| (according to SEQ ID NO: 82) | |
| Ventral anterior homeobox 1; VAX1 | Cancers, preferably lung |
| SHOX2-2 | Cancers, preferably lung |
| EN2-2 | Cancers, preferably lung |
| EN2-3 | Cancers, preferably lung |
| ONECUT1 | Cancers, preferably lung |
| FOXL2 | Cancers, preferably lung |
| TFAP2E | Cancers, preferably lung |
| BAHRL2 | Cancers, preferably lung |

TABLE 3A

| Gene/ | | | |
|---|---|---|---|
| Genomic region | Primer 1/SEQ ID NO: | Primer 2/SEQ ID NO: | Probe/SEQ ID NO: |
| SEQ ID NO: 6 | aaccgcaacgactaacaa | Agggcgtttagttaat | cgcgacgacaaaacgccctt |
| | cgaa/64 | tcgc/65 | taaaaacgaa/66 |
| CN027 | cacgcacgatactaaacg | tcgatcgtgttggttg | cgaccgcctaccgcttcata |
| | cc/67 | ttc/68 | ataacgt/69 |
| LRAT | acccgataaaaacatcgc | gttcgtgcgtttgtag | aacgcgaccaacgcttcaac |
| | gta/70 | ttcgat/71 | gac/72 |
| TFAP2C | Tttttgttaagcggtttc | ccgcctaaaaacgtct | taaaaactcgcgcaacaccg |
| | ggattt/73 | acgcaa/74 | taccgtaaa/75 |
| EVX-1 | gttagtttttttttgtcg | tcgcctaaactcaact | gcgttcgggagtttcgtgag |
| | tttttttttcgt/76 | acacga/77 | g/78 |
| EVX-2 | Cggttagttcgtatcggc | Cgaatcaaatacgacg | Tcgcgcgcctaaaaaaaaaa |
| | g/149 | ctaccg/150 | ttctaccg/151 |
| SHOX2 | Caaataatctccgtcccg | Gttaatatggcgtggg | Tacccgaccgaaatcgcacg |
| | c/152 | cgt/153 | aaca/154 |
| ARID5A | Cgaaccataaataaacga | Gggattcggcgtcggt | Cgaaagaacaaaaactcgac |
| | ctctacga/155 | a/156 | gacc/157 |
| RUNX1 | Aaaaacgacgaaaacgcg | Tgcgcgtcgttgataa | Tctaatacgcaacgcgccgc |
| | a/158 | cg/159 | aa/160 |
| PTGER4 | Aacgattaacgaacctca | Gtattgtagtcgcgag | Ctatacgtccaacgtactct |
| | cgc/161 | ttatcgaga/162 | tttacgcgctacc/163 |
| BCL2 | Gtggtatcgggttgagcg | Ccaaaacctcgccgct | Tttcgcggcggcgtcgggg |
| | t/164 | ac/165 | g/166 |
| IL-12RB1 | Ccccacaaactcgaaaac | Ggaagttcggtttttt | Tcgaatcacgaaaaccccaa |
| | gaa/167 | ttttcgg/168 | aaaacataacga/169 |

TABLE 3B

| Target sequence (Genomic) | Oligo SEQ ID NO: | Sequence |
|---|---|---|
| SEQ ID NO: 79 Forward Primer | 104 | tatcgcggagattttcgagttttcgttg |
| SEQ ID NO: 79 Probe | 105 | ggggttgtttttcgggatt |
| SEQ ID NO: 79 Reverse Primer | 106 | gataaccctaaaacgcaactcgaa |
| SEQ ID NO: 80 Reverse Primer | 107 | cgtttcgtaaggagcgtgtt |
| SEQ ID NO: 80 Forward Primer | 108 | cgcgttgttcgcggttagtttcgt |
| SEQ ID NO: 80 Probe | 109 | cgacgttttcgcgtgg |
| SEQ ID NO: 81 Forward Primer | 110 | gttttgaaatttattagaataacgacgtt |
| SEQ ID NO: 81 Reverse Primer | 111 | ctttctaaaaataaccgaactatactacgac |
| SEQ ID NO: 81 Probe | 112 | tacggacgttcgcgggtcgtt |
| SEQ ID NO: 82 Probe | 113 | agtaagttcgcgtagattcggttt |
| SEQ ID NO: 82 Reverse Primer | 114 | taaaacgacgaaacgaccgat |
| SEQ ID NO: 82 Forward Primer | 115 | tcgtcgttttcgggttgtcgagtg |
| SEQ ID NO: 83 Probe | 116 | aaggaagtggaataaatcgtcgta |
| SEQ ID NO: 83 Forward Primer | 117 | aggcgtttttgttttttcggaaattcgaaattc |
| SEQ ID NO: 83 Reverse Primer | 118 | ctacgactaataccgtaaacgccta |

TABLE 3C
MSP ASSAYS

| Gene/ | MSP-Amplicon/ | Forward Primer/ | Reverse Primer/ | Probe/ |
|---|---|---|---|---|
| Genomic region | SEQ ID NO: | SEQ ID NO: | SEQ ID NO: | SEQ ID NO: |
| ONECUT1 | gttttgaaatttatagaa | gttttgaaatttattagaat | ctttctaaaaataac | tacggacgttcgcgggtc |
| | taacgacgttttaaaaat | aacgacgtt/159 | cgaactatactacga | gtt/161 |
| | aaaggcgtagtaagtatt | | c/160 | |
| | ttttttttcgttgtcgcg | | | |
| | ggttgaattacggacgtt | | | |
| | cgcgggtcgtttagtttc | | | |
| | gacggttcgtagggggcg | | | |
| | cgcgtcgtagtcgtagta | | | |
| | tagttcggttatttttag | | | |
| | aaag/154 | | | |
| TFAP2E | tttagaagcggttttcgt | tttagaagcggttttcgtat | ccgaacgcttaccta | ttgcggtgggcgttttcg |
| | atcgttgcggtgggcgtt | c/170 | caatc/171 | ggtt/172 |
| | ttcgggtttcgatttcgt | | | |
| | tagcgtcgcggggtagag | | | |
| | gtatttggagttcgtagg | | | |
| | gtttagatttgggttgga | | | |
| | aaagtttcgttgattgta | | | |
| | ggtaagcgttcgg/155 | | | |

TABLE 3D
HeavyMethyl ASSAYS

| Gene/ | | Forward | Reverse | Forward | Reverse | |
|---|---|---|---|---|---|---|
| Genomic | HM-Amplicon/ | Primer/ | Primer/ | Blocker/ | Blocker/ | Probe/ |
| region | SEQ ID NO: | SEQ ID NO: | SEQ ID NO: | SEQ ID NO: | SEQ ID NO: | SEQ ID NO: |
| FOXL-2 | ccaagacctgggcttgc | ccaaaacct | gagaggggt | tacaacacca | ttgggaagat | ccgccgaaaa |
| | agcgccgccaacaggcc | aaacttaca | t agtagt/ | ccaacaaacc | tttggtttgg | cacgaaacgg |
| | cggggacacgaggcgct | ac/162 | 163 | caaaaacaca | agt /165 | cgggagaggg |
| | ccaggccggggtcttcc | | | a /164 | | gttagtagt/ |
| | cggctgctggcccctct | | | | | 166; |
| | cgctccccacccgctgg | | | | | cccgggaaga |
| | cggcgcctcggtcgccc | | | | | ttttggtttg |
| | gcaattgacccaacccg | | | | | gagcccggcc |
| | cttcctgcgtttgcccc | | | | | aaaacct aa |
| | tcaggtt tcc/157 | | | | | acttacaac/ |
| | | | | | | 167; |
| | | | | | | ctccaaacca |
| | | | | | | aaatcttccc |
| | | | | | | /168; |
| | | | | | | ccgaaaacac |
| | | | | | | gaaacgctc/ |
| | | | | | | 169 |
| TFAP2E | aaacccaaacctaaatt | aaacccaaac | ggaagtgtgt | gtaaagtgtt | | aaaacttcgc |
| | aaaaaaacttcgctaac | ctaaattaaa | ggtaaag | ggggttttgt | | taactacaaa |
| | tacaaacaaacgtccga | /173 | /174 | ttggttgttt | | caaac /176 |
| | aaaaaacgaccaaacga | | | /175 | | |
| | aaccccgacgctttacc | | | | | |
| | acacacttcc/158 | | | | | |

TABLE 3E
TSP ASSAYS

| Gene/ | | Primer 1/ | Primer 2/ | Probe/ |
|---|---|---|---|---|
| Genomic region | TSP PCR Amplicon | SEQ ID NO: | SEQ ID NO: | SEQ ID NO: |
| BARHL2 | attgtttgttagtttttaagttaa | gttttgaaattt | acatataacaa | ttggattattt |
| | tcgtagtaataatcgttggattat | attagaataacg | atatatttt a | taaatgtggtt |
| | tttaaatgtggttaaaatcgacgt | acgtt /177 | tccaac /178 | aaaa/179 |
| | tggataaaattaatttgttatatg | | | |
| | t /156 | | | |

TABLE 4A

| | | | Large cell | Squamous cell | Small cell | |
|---|---|---|---|---|---|---|
| | All lung | Lung | lung | lung | lung | Prostate |
| Tissue type | cancers | adenocarcinoma | cancer | carcinoma | carcinoma | carcinoma |
| PMR threshold (%) | >20 | >20 | >20 | >20 | >20 | >20 |
| N (total) | 61 | 21 | 12 | 21 | 7 | 10 |
| Gene | | | | | | |
| EVX2 | 76.8 | 52.4 | 75.0 | 90.5 | 100.0 | 60.0 |
| RUNX1 | 76.7 | 61.9 | 58.3 | 85.7 | 100.0 | 100.0 |
| PTGER4 | 66.1 | 66.7 | 66.7 | 61.9 | 71.4 | 100.0 |
| SHOX2 | 63.0 | 38.1 | 50.0 | 90.5 | 71.4 | 20.0 |
| SEQ ID NO: 6 | 68.2 | 38.1 | 33.3 | 95.2 | 100.0 | 100.0 |
| CN027 | 55.9 | 38.1 | 41.7 | 71.4 | 71.4 | 100.0 |
| LRAT | 41.7 | 42.9 | 33.3 | 42.9 | 42.9 | 30.0 |
| IL-12RB1 | 24.9 | 14.3 | 16.7 | 28.6 | 42.9 | 100.0 |
| EVX-1 | 47.4 | 38.1 | 33.3 | 57.1 | 57.1 | 100.0 |
| TFAP2C | 68.1 | 38.1 | 58.3 | 85.7 | 100.0 | 100.0 |
| BCL2 | 14.1 | 23.8 | 8.3 | 14.3 | 0.0 | 50.0 |

TABLE 4B

| | | | | Lung | | |
|---|---|---|---|---|---|---|
| | | | | diseasesd | | |
| | Colorectal | Breast | Bladder | (Not | Lung | |
| Tissue type | cancer | carcinoma | carcinoma | cancer) | healthy | Blood |
| PMR threshold (%) | >20 | >20 | >20 | >5 | >5 | >0.2 |
| N (total) | 10 | 10 | 10 | 7 | 12 | 20 |
| Gene | | | | | | |
| EVX2 | 40.0 | 80.0 | 80.0 | 0.0 | 0.0 | 55.0 |
| RUNX1 | 20.0 | 80.0 | 60.0 | 0.0 | 0.0 | 0.0 |
| PTGER4 | 0.0 | 80.0 | 30.0 | 0.0 | 0.0 | 0.0 |
| SHOX2 | 60.0 | 80.0 | 70.0 | 0.0 | 0.0 | 10.0 |
| SEQ ID NO: 6 | 60.0 | 50.0 | 50.0 | 28.6 | 33.3 | 25.0 |
| CN027 | 90.0 | 70.0 | 70.0 | 0.0 | 8.3 | 25.0 |
| LRAT | 90.0 | 60.0 | 60.0 | 0.0 | 0.0 | 0.0 |
| IL-12RB1 | 0.0 | 80.0 | 30.0 | 85.7 | 100.0 | 0.0 |
| EVX-1 | 80.0 | 80.0 | 90.0 | 0.0 | 0.0 | 0.0 |
| TFAP2C | 100.0 | 100.0 | 60.0 | 14.3 | 0.0 | 25.0 |
| BCL2 | 0.0 | 10.0 | 60.0 | 0.0 | 0.0 | 0.0 |

TABLE 4C

| | | | Large | | | |
|---|---|---|---|---|---|---|
| | | | cell | Squamous cell | Small cell | |
| | All lung | Lung | lung | lung | lung | Prostate |
| Tissue type | cancers | adenocarcinoma | cancer | carcinoma | carcinoma | carcinoma |
| PMR threshold | >20 | >20 | >20 | >20 | >20 | >20 |
| (%) | | | | | | |
| N (total) | 61 | 21 | 12 | 21 | 7 | 10 |
| SEQ ID NO: | | | | | | |
| SEQ ID NO: 79 | 38 | 29 | 33 | 57 | 29 | 55 |
| SEQ ID NO: 80 | 42 | 29 | 16 | 66 | 43 | 11 |
| SEQ ID NO: 81 | 24 | 24 | 8 | 28 | 29 | 11 |
| SEQ ID NO: 82 | 58 | 57 | 50 | 62 | 57 | 66 |
| SEQ ID NO: 83 | 45 | 24 | 33 | 66 | 57 | 25 |

TABLE 4D

| | | | | | | | | Lung | | |
|---|---|---|---|---|---|---|---|---|---|---|
| | | | | | | | | diseasesd | | |
| Tissue | Healthy | Colorectal | Healthy | Breast | Healthy | Bladder | Healthy | (Not | Lung | |
| type | Prostate | cancer | Colon | carcinoma | breast | carcinoma | Bladder | cancer) | healthy | Blood |
| PMR | >5 | >20 | >5 | >20 | >5 | >20 | >5 | >5 | >5 | >0.2 |
| threshold | | | | | | | | | | |
| (%) | | | | | | | | | | |
| N (total) | 11 | 10 | 9 | 10 | 12 | 10 | 10 | 7 | 12 | 20 |
| SEQ ID | | | | | | | | | | |
| NO: | | | | | | | | | | |
| SEQ ID | 0 | 40 | 0 | 50 | 0 | 40 | 0 | 0 | 0 | 0 |
| NO: 79 | | | | | | | | | | |
| SEQ ID | 0 | 50 | 0 | 40 | 0 | 30 | 0 | 0 | 0 | 0 |
| NO: 80 | | | | | | | | | | |
| SEQ ID | 0 | 40 | 0 | 20 | 0 | 10 | 0 | 0 | 0 | 0 |
| NO: 81 | | | | | | | | | | |
| SEQ ID | 12 | 10 | 22 | 60 | 0 | 90 | 70 | 0 | 0 | 0 |
| NO: 82 | | | | | | | | | | |
| SEQ ID | 12 | 60 | 0 | 50 | 0 | 60 | 10 | 0 | 0 | 0 |
| NO: 83 | | | | | | | | | | |

TABLE 5

| | |
|---|---|
| PTGER4 | RUNX1 |

| NSCLC | Sens | Spec | Sens | Spec |
|---|---|---|---|---|
| Bronchial | 52% | 91% | 39% | 91% |
| Lavage | | | | |
| Blood | 69% | 91% | — | — |
| Plasma | | | | |

| Gene/Marker | AUC | Sensitivity | Specificity |
|---|---|---|---|
| SHOX2.7 | 0.879 | 0.800 | 0.957 |
| SHOX2.15 | 0.886 | 0.625 | 0.957 |
| PTGER42 | 0.830 | 0.400 | 0.957 |
| PRDM14 | 0.867 | 0.400 | 0.957 |
| EN27 | 0.690 | 0.350 | 0.957 |
| BARHL2 | 0.766 | 0.400 | 0.957 |
| FOXL2 | 0.911 | 0.575 | 0.957 |
| EVX2 Assay 1 | 0.779 | 0.525 | 0.957 |
| EVX2 Assay 2 | 0.702 | 0.350 | 0.957 |

### EXAMPLES

### Example 1

[0239] Analysis of methylation of the genes/sequences according to Table 1 in multiple cancer and control tissue samples was carried out by means of a Real-Time MSP assay using the components according to Table 3.

### Samples

| Tissue Type | No. of samples |
|---|---|
| Lung adenocarcinoma | 21 |
| Large cell lung cancer | 12 |
| Squamouscell lung carcinoma | 21 |
| Small cell lung carcinoma | 7 |
| Prostate carcinoma | 10 |
| Colorectal cancer | 10 |
| Breast carcinoma | 10 |
| Bladder carcinoma | 10 |
| Lung diseasesd (Not cancer) | 7 |
| Lung healthy | 12 |
| Blood/white blood cells | 20 |

### DNA Extraction and Bisulfite Treatment

[0241] The DNA was isolated from the all samples according to a modified protocol based on that disclosed in the Qiagen Genomic DNA Handbook (August 2001) (pg 28-31, 44-47). The DNA in the eluate was quantified and the eluate was treated according to the following bisulfite reaction.

[0242] The eluate was mixed with 354 μl of bisulfite solution (5.89 mol/l) and 146 μl of dioxane containing a radical scavenger (6-hydroxy-2,5,7,8-tetramethylchromane 2-carboxylic acid, 98.6 mg in 2.5 ml of dioxane). The reaction mixture was denatured for 3 min at 99° C. and subsequently incubated at the following temperature program for a total of 7 h min 50° C.; one thermospike (99.9° C.) for 3 min; 1.5 h 50° C.; one thermospike (99° C.) for 3 min; 3 h 50° C. The reaction mixture was subsequently purified by ultrafiltration using a Millipore Microcon™ column. The purification was conducted essentially according to the manufacturer's instructions. For this purpose, the reaction mixture was mixed with 300 μl of water, loaded onto the ultrafiltration membrane, centrifuged for 15 min and subsequently washed with 1×TE buffer. The DNA remains on the membrane in this treatment. Then desulfonation is performed. For this purpose, 0.2 mol/l NaOH was added and incubated for 10 min. A centrifugation (10 min) was then conducted, followed by a washing step with 1×TE buffer. After this, the DNA was eluted. For this purpose, the membrane was mixed for 10 minutes with 75 μl of warm 1×TE buffer (50° C.). The membrane was turned over according to the manufacturer's instructions. Subsequently a repeated centrifugation was conducted, with which the DNA was removed from the membrane. 10 μl of the eluate was utilized for the Lightcycler Real Time PCR assay.\

### Reference Assay

[0243] The GSTP1 reference assay design makes it suitable for quantitating bisulfite converted DNA from different sources, including fresh/frozen samples, remote samples such as plasma or serum, and DNA obtained from archival specimen such as paraffin embedded material. The assay measures the total DNA independly from its methylation status, as long as no CpG is covered by the PCR oligonucleotides.

[0244] The following components were used in the reaction to amplify the control amplificate:

[0245] 10 μl of template DNA

[0246] 2 μl of FastStart LightCycler Mix for hybridization probes (Roche Diagnostics)

[0247] 3.5 mmol/l MgCl2 (Roche Diagnostics)

[0248] 0.60 μmol/l forward primer (SEC) ID NO: 61, TIB-MolBiol)

[0249] 0.60 μmol/l reverse primer (SEC) ID NO: 62, TIB-MolBiol)

[0250] 0.2 μmol/l probe (SEQ ID NO: 63, TIB-MolBiol)

[0251] The following oligonucleotides were used in the reaction to amplify the control amplificate:

Primer1:
(SEQ ID NO: 61)
GGAGTGGAGGAAATTGAGAT
Primer2:
(SEQ ID NO: 62)
CCACACAACAAATACTCAAAAC
Probe:
(SEQ ID NO: 63)
FAM-TGGGTGTTTGTAATTTTTGTTTTGTGTTAGGTT-TAMRA

[0252] The assay was performed in the LightCycler 480 according to the following temperature-time-profile:

[0253] Activation 10 min at 95° C.

[0254] 50 cycles: 10 sec at 95° C.
[0255] 30 sec at 56° C.
[0256] 10 sec at 72° C.

[0257] The detection was carried out during the annealing phase at 56° C. in channel for 530 nm with a target specific fluorescence probe (Seq ID-63).

### Methylation Specific Real Time PCR

[0258] The methylation specific real time PCR (MSP) reactions were performed on the bisulfite converted sample DNA. All MSP master mixes were the Roche FastStart TaqMan Probe Master containing 300 nM ROX reference dye on the AB17900 instrument. Each reaction contained 600 nM of the forward primer, 600 nM reverse primer, and 200 nM of the detection probe (see table with Seq-IDs of the markers). The reactions were performed in a final volume of 20 microL using the AB17900 instrument with following temperature and time profile:

[0259] Activation 10 min at 95° C.

[0260] 50 cycles: 15 sec at 95° C.
[0261] 60 sec at 60° C.

### Data Interpretation

[0262] Calculation of DNA concentration. The CP (crossing point values) as calculated by the AB17900 instrument software using a specific threshold was used for each assay to determine DNA concentration. The DNA concentration was calculated by reference of the CP value of each well to a calibration standard. The calibration standard was prepared from methylated bisulfite converted human DNA containing 10, 5, 2.5, 1, 0.4, 0.1, and 0.05 ng per reaction. The calibration curves was used for both the methylation specific marker assays and the C3 reference assay.

### Percentage Methylation

[0263] For each sample the detected percentage methylation was calculated as the measured concentration of DNA quantified using the methylation assays over the concentration of DNA in the sample as quantified by the C3 assay. The methylation ratios were calculated according to the PMR value method (Eads et al., Cancer Res. 2001 Apr. 15; 61(8): 3410-8, PMID 11309301) against the total DNA quantified by the C3 reference PCR.

[0264] Detection of methylation was determined at multiple different threshold levels, see Tables 4A to 4D).

[0265] Results are provided in Table 4A to 4D indicating the % of samples of each tissue class with methylation above the PMR (% methylation) threshold.

### Example 2

[0266] Analysis of methylation of the genes PTGER4 and RUNX1 was confirmed in cancer and control body fluid samples (plasma, bronchial lavage).

### Samples

| Analysis Group | plasma | lavage |
|---|---|---|
| Lung adenocarcinoma | 50 | 50 |
| Benign lung disease | 50 | 50 |

[0268] DNA was extracted from plasma and bronchial lavage using MagnaPure (Roche Diagnostics)

[0269] For bronchial lavage (BL) samples the following preprocessing was performed: 1 ml of BL sample was centrifuged for 10 minutes at 8,000×g to pellet sample. After removing 900 ul of supernatant, the cells were resuspended in the remaining 100 ul of liquid. Then 130 ul of Bacteria Lysis Buffer and 20 ul of Proteinase K were added to the sample, which was vortexed for 10 seconds. After a quick spin down to collect the sample at the bottom of the tube it was incubated for 10 minutes at 60 C and for 15 minutes at 90 C. Then the sample was cooled down for 60 seconds and collected at the bottom of the tube by briefly centrifuging it.

[0270] Bisulfite treatment and reference assays were carried out, substantially as above. Methylation analysis was carried out by means of a Real-Time PCR HM assay.

### Example 3

[0271] The following analysis was performed to examine the methylation status of SHOX2, FOXL2, PTGER4, EVX2, EN2, PRDM14 and BARHL2 gene markers. Two additional loci each located within the genes EVX2 and SHOX2.15, respectively, were also tested.

[0272] DNA was first extracted from bronchial lavage samples and bisulfite treated. The treated DNA was analyzed using HeavyMethyl-based real-time PCR on the ABI PRISM 7900HT platform.

### Preanalytics

[0273] DNA Extraction.

[0274] Genomic DNA from unfixed bronchial lavage specimens was isolated using a QIAamp DNA Micro Kit (Qiagen, Hilden, Germany). The viscosity of the bronchial lavage samples was reduced, before DNA extraction, by adding 1,4-Dithiothreitol (DTT, Carl Roth, Germany) to a final concentration of 0.225% and incubating the samples at room temperature for at least 30 minutes or until the desired fluidity was obtained. After centrifugation at 3200×g for 12 minutes, the pellet was processed using a QIAamp DNA Micro Kit according to the manufacturer's protocol.

[0275] Bisulfite Treatment.

[0276] Bisulfite treatment of extracted sample DNA was performed using an EpiTect Kit (Qiagen, Hilden, Germany) according to the manufacturer's instructions with the following modifications. A fixed volume of 15 μl DNA from sample extractions was mixed with 5 μl water, 85 μl bisulfite mix and 35 μl protection buffer. Two elution steps were performed using 25 μl elution buffer each time.

### Analytics

[0277] Principle.

[0278] The quantification of methylation of a specific locus is achieved via two PCRs. The first PCR is comprised of two gene specific primers and a gene specific probe, which detects DNA irrespective of its methylation state (quantification of total DNA). The second PCR is comprised of the same primers but contains a probe specific for methylated DNA and two blockers to suppress the amplification of unmethylated DNA.

SHOX2 Primer 1:
(SEQ ID NO: 152)
caaataatctccgtcccgc
SHOX2 Primer 2:
(SEQ ID NO: 153)
gttaatatggcgtgggcgt
FOXL2 Forward primer:
(SEQ ID NO: 44)
ccaaaacctaaacttacaac
FOXL2 Reverse primer:
(SEQ ID NO: 45)
gagaggggttagtagt
FOXL2 Forward blocker:
(SEQ ID NO: 46)
tacaacaccaccaacaaacccaaaaacacaa
FOXL2 Reverse blocker:
(SEQ ID NO: 47)
ttgggaagattttggtttggagt
PTGER4 Primer 1:
(SEQ ID NO: 161)
aacgattaacgaacctcacgc
PTGER4 Primer 2:
(SEQ ID NO: 162)
gtattgtagtcgcgagttatcgaga
PRDM14 Forward Primer:
(SEQ ID NO: 107)
cgtttcgtaaggagcgtgtt
PRDM14 Reverse Primer:
(SEQ ID NO: 108)
cgcgttgttcgcggttagtttcgt

[0279] For the BARHL2 assay (for BARHL2), the DNA restriction Enzyme Tsp5091 is used instead of the blocking oligonucleotides. This enzyme specifically cuts unmethylated DNA after bisulfite-treatment leading to methylation specific amplification.

[0280] For BARHL2 (SEQ ID NO: 125)

Primer
(SEQ ID NO: 59)
gttttgaaatttattagaataacgacgtt
Primer
(SEQ ID NO: 60)
acatataacaaatatatttt atccaac

[0281] Biomarkers/Assays.

[0282] Assays were performed on the following markers using Scorpion probes: SHOX2.7, SHOX2.15, FOXL2, PTGER4 and PRDM14. In the case of SHOX2, two independent assays represented by SHOX2.7 and SHOX2.15 were performed on the same sequence.

SHOX2 Probe:
(SEQ ID NO: 154)
tacccgaccgaaatcgcacgaaca
FOXL2 Methylation-specific Probe:
(SEQ ID NO: 48)
ccgccgaaaacacgaaacggcgggagaggggttagtagt
FOXL2 Total DNA Probe:
(SEQ ID NO: 49)
cccgggaagattttggtttggagcccgggccaaaacctaaacttacaac
PTGER4 Probe:
(SEQ ID NO: 163)
ctatacgtccaacgtactcttttacgcgctacc
PRDM14 Probe:
(SEQ ID NO: 109)
cgacgttttcgcgtgg

[0283] Assays were performed on the following markers using TaqMan probes: BARHL2, EVX2 Assay 1, EVX2 Assay 2 and EN2.7. For the marker EVX2, two assays were conducted on the same sequence: Assay 1 and Assay 2.

BARHL2 Probe:
(SEQ ID NO: 61)
ttggattattttaaatgtggttaaaa
EVX2 Probe:
(SEQ ID NO: 151)
tcgcgcgcctaaaaaaaaaattctaccg
EN2 Probe:
(SEQ ID NO: 105)
ggggttgtttttcgggatt

[0284] Primers for the EVX2 and EN2 reactions:

EVX2 Primer 1:
(SEQ ID NO: 149)
cggttagttcgtatcggcg
EVX2 Primer 2:
(SEQ ID NO: 150)
cgaatcaaatacgacgctaccg
EN2 Forward Primer:
(SEQ ID NO: 104)
tatcgcggagattttcgagttttcgttg
EN2 Reverse Primer:
(SEQ ID NO: 106)
gataaccctaaaacgcaactcgaa

[0285] Heavy Methyl based real-time PCRReal-time PCR experiments were performed using the Applied Biosystems ABI PRISM 7900HT instrument. Each real-time assay for one biomarker consisted of two independent reactions: a reference reaction for quantification of total input DNA and a HM-reaction for quantification of methylated target template. The reference assay was composed of two methylation-unspecific oligonucleotides and a methylation unspecific probe, whereas the HM-assay consisted of the same two methylation-unspecific primers, but in addition, two methylation-specific blockers (one for each primer) and a methylation-specific probe. For the biomarker BARHL2, the DNA restriction Enzyme Tsp5091 was used instead of the blocking oligonucleotides. This enzyme specifically cuts unmethylated DNA during amplification after bisulfite-treatment. As a result, the unmethylated DNA is not amplified.

[0286] Two different probe systems were used for RT-PCR analysis, depending on the biomarker/assay. For SHOX2.7, SHOX2.15, FOXL2, PTGER4 and PRDM14 Scorpion probes consisting of a methylation-unspecific primer part and a methylation-specific probe part were used. The Scorpions contained BHQ1 as quencher and 6-FAM as fluorescent reporter. For the markers BARHL2, EVX2, EVX2 and EN2.7 TaqMan probes with BHQ1 and 6-FAM were used as detection system. Each assay was tested on 86 BL samples (40 cancer, 46 benign lung disease). Several PCR controls were included on each PCR plate. The controls contained 50 ng of bisulfite-treated Sperm DNA (0% BisStd), which is usually unmethylated, 0.5 ng methylated Chemicon DNA in 50 ng Sperm DNA (1% BisStd) and non template controls (NTCs). These controls were used to monitor the general RT-PCR performance and to define concentration limits for sample exclusion (see Data and Statistical analyses).

[0287] The 20 μl PCR reactions contained the following:

0.25 μl bisulfite treated sample DNA (no prior determination of concentration)
10 μl QuantiTect Multiplex PCR NoROX mixture (Qiagen, Hilden)
0.3 μM unspecific forward and reverse primer and either
0.3 μM TaqMan probe or
0.15 μM Scorpion probe.

[0288] When a Scorpion probe was used in the experiment, the concentration of the respective non-probe primer was reduced to 0.15 μM. TaqMan probe concentration was 0.30 μM. For HM-reactions, blockers where added to a final concentration of 1 μM each. For Tsp5091-based assay, 1U of restriction enzyme was used for the methylation-specific amplification.

[0289] Thermocycling conditions were as follows: an initial denaturation at 95 CC for minutes followed by 50 cycles of 95° C. for 15 seconds and a annealing/denaturation step at 56° C. for 30 seconds (SHOX2: 58° C.). Single fluorescent detection was performed during the annealing/elongation step.

### Clinical Samples

[0290] Number of clinical samples: 86

[0291] Cancer samples: 40

[0292] Benign samples: 46

The application's sequence listing, which the Patent Office published only in electronic form, follows.

SEQUENCE LISTING (200 sequences)

SEQ ID NO: 1 - DNA, 3905 bp, Homo Sapiens
ttcaaaaaagcagatccgaagatgtttaaagtaataatggtgctgttagaatggtgctccctctccctcccaggggatgactttgaaggacactacaataacagatgtgtaaattctgaaatatatggctaaaatgaggtttattattttctagtcaccacttagacatcttttagtcatttgtttatgacagtttataaatgagaaagaagtccatttaaaatatctccatgaggacctcaaggtaaataataggaatcgatcattcatcaatctggcctggccccggcccactgaagaaagttccttcttgagtgcattcaaagctctcatggtccagccctgttcaacctgagcagcatcctatctgctcctcccccagacgttccgatgccctgcaccagattcaagagagagccaagttccccaacaggctatgcacgtggctattaacacccagcacacgctatccctggccagctctctccttcttccctaagaattaaacattctttggcctgagttttcctcctttatgtcaccataaagttgagttattcattattagggtctatacatgagtagccaaaatatacgggtctctatatttaggtcaaggggccttcagcaggagaacatgaataattaggagtgaggccatgagacagaggaagaaaagctcataggaatgggaagacagcctctcagatgagaggtgtgcggagtgattgctgtgaggaattgctcaataggaaagttagccaacctgaggacgtttctaggggaggaaaagggaaactcatatggttctctgctaattcttaaaaataaggtagattcttactcatctagggtgcttgctcgttatgaacacaggaagattaaggaatgagtatggactgtttctactctatgttttcggacaagaagaataataaaaaagcactgggtagctggaacaactgcagaggccccaacaatgatggagactttctggtgcaccgtggcacaggggtctcttccaaagggactcaatcaaccccaacaggcatcatcttctgtgactcaagatgtcctttttaggagtgcttgtactttttaatgctcagagaagttcgtattactgattcgggaacactgagtttttcagctcctgtaaaactattttcaggtttattttcaagtacattctttacctcggggggtcaaatcttttggtttccagtgaatatcgtggttatacctgtggttacccactgacttctcatctgcctagcttatctgataacaggcaaatggggaaagaggctttaatacccctcaaaaggggaagattgataattagttattcaccgcatagaatcaggccaggtcaactctctccaagaagaaaagcaatctggatattgcactttggggtcccttttcattttggcattacaggcctcatgaggatgtagtctttctgtatttctttctttctttttaaattgttatttatttatttattttaaccaggtcaaagcattacatactgcagaagagaaagcaacttcagcttctcttaaacggtgtcattttcatgacagctcgtaaattttggcctcctatgggtccaggatctgcgcgcatccgcccggggacttgttggtggatccatccctcatggcggagcagcaaggggatcctttagaaaaagcaatgggcgaagtaactgaaagagcgacgcagaaagcaacagccagaaacggcggggacgcgagcggcccagacaggaagggaggcggtggcgcagctctggtgcgcagcgcgccgcagcgacggaacttctgcaaaagctgcctgcccgcgcgttatcagcggcgcgcaggcctgtggttttctcgctctcgcaaccctgctttaactgccggtttatttttcgacaaacaggatgcctccatctgaggctgtcagcatcccaggctctttgaaagaaaagaagtagagcggccccaccctagaggcaaggacggggtctgtgtcaagaggcttcccagagaagtgaaaactctgcaggtgcagccgctgggagagcatcaagaagggcagggtggaggggcagggggcgaagggagggggtgaagcccgcaccctacccccacatgaaactgattccactaccccatctctgcaagcgtccagaggcagagaggccaacatttcggggacagcttggaggcgggagatttaggcagggctccttaaacttttatgtgcatgaaaatcaggccaatcacggggctcttgagcaaatggggacgatgattcagcaggtctgggctgaggcctcagattctgcacttctaacaagttcccaggtggtagtgatgctgccagtccaaagaccacactgtgaatagcaaggcgtcgtcgggacagtctgctttagagtaaaacctaatagatgtgcaaatatttaaaccaagctgtatttattcctgaggccctggtttaactggagccaccttgctaatggaaaatggaaaatgaaattcctttaggttccaaagggaaggaaagtttgaaatggttaaggtatttaaaaaatcctagttgggagtggccttggggattcgggagagttgaagttaggttctgagccaagagatgggggaggaagggtgggatgtggcaaataaatataaacacacacacacaaaccccagcccaaccacaggttctttcctatcaatgaaacatttgcatcttgcaggtagaactcacacgtgtccacatttttcagaagttgaatggttttgtgtaatggtacagaatttggagcccatatttgaatattctagatccaatgttatctcagactggctttaggatcttgtggcctacatttaaaaatgcatgtttctgagtcatgtttaattagtagtagtatctgagaactgagagactagactaagaaatccatggtatatgaataaaatctccagacagcagctagaacatagaggtccctccagaggcagtgccagttgtcagctgtaaaaataggttctgctcagttttgcttaggcctgaagtttcctgaagatttcatttagacttcatcaaaaccagtcaaagacttcctgttacagaaaggttcttaaagtatggctgggactacagggctattaagatgcagattcttgggcctctctgcctcactcatcatggtttctcagggtgggtgccgggaacctgcattttaacaaacgctttgaggattcttatgtactgccaagtttaggagtccctggtctgcaggtttaagttcaaccttctcactgcagcattcaaagacctggcttcaattttgctgttcacaggcgagcctcagtgacttcctcactgccctctgagcactcctggagccacctggctgcctcattcatttcttctcctctgtctttccccagccctggaataaaatgacttccatcttcctctccgaactctcttcagatcatggcttcccactcagcaagcagttactttcctggtctgccactgctgtggtattaatgataggccactcgattctcattttgttgactgaatatttctcatgcttaggctttgcctccctgaccagacagtaagttctctgaagccatttcatgctatataatctttatgttcaagactactttctaacgcagtgtcatgtccacatggatcattcagtaaatttaccgatggcttatctatcaccaacatgttttacagagtgttattaagcagggacactctctatgggtctaggatcagaagaagctgggaagagaaatggggtagtggtgagagtgtcatgagaatctggttatacagtcatcaaagacacagaggaagtgggaaaaagggagtgt

SEQ ID NO: 2 - DNA, 5338 bp, Homo Sapiens
ggcaacctcttttgccatcactttttgcataaaatatgcaagatgcttccattccatcagcactgaaaccaaagaccaaaagagagaaaggtgttggaccgaaaaggaggcggcgcaacggccaccccttccagcacctcggctttgtccttcccggggaaggcggccacatccctacccgccttgctcctgaacgtagtaaacaatctcacaaacaaccaccgctgcccacgctctccatccgtcctcccggccttatcagacctccgttctcccgcactcttcgggcagggtccctaataagctcaggctgaaagaacgtttgccacctcccccaccctcgttgaaagaaaaggaagaaaaacagcagcagcgagaaacctccggggcgactcctcccccgcccccaagcaccagcgcacagcatccccctctgtctttgttgtggttctccgttgcttcgggccacgccgttcagccaagcaacccggacctgagagtgcacagccaggactagcttagggggcgaggggttggtctttgggaaaccaagcgctcaggacagaggtggaaagtgggtcccgggagccagaaaagagagagaagggcagacggctgggtggcaaatacaaaaatagaaataatttagggggatgcccgccaggcttttgcgcctgctccttctcccccaattcggagcaggttcccttcggcctcccgcgccccggggcgccccctggcggcagcggcagcagcgggcaacgcgcggagggctcagggggcgcacaggggactcccgggcacactcagagaggcgggcgcggccccctggcggtggcgacgtagttatctggtgagcggagcctcgtccctctggtccggcgggctcacggccgtcttactaagcaccgcggccgagtagggcaggaagccgctctcggaacgcggcgccgccgcgctgcagccgaagtccgagcctcccccggccccggcgcccccgccgccgccgccaccaccaccaccgccgccgccaccgccaccccgggaacccagggctgcggcagctgctgccgcggctgccgccgccgactgactgctgtggcaactgaggcacgagcagggtgcagagccgccgctggggggcgcgccggccgccgccgccgaggaggccgcagccgctgcggctgccgcggctgccgcggcagaggccgcgctgttgagccccgcggcggccgcgggagcctggtagagaccagggtggcggaagctacacagcagctccggccgagagtaggggtgcgagagggcgcggaaggtgtccagtggccggatggaagtagcgaagggcgacgaagccgcggccgccgcgcctgaggctgcagccgcggccgccgccgccgtgacgcccacgtgcgggtagtagtgcagcggcacgtgcgagtggaaggggtagggcaggcttccggtggcggccgcgtgcgtcatcatgtaggtgtagaagctggggtcggctgggtgcggccaggacatggccaggcgctgccgcttgtccttcatgcgccggttctggaaccacacctgcggggagagacgcgccgcagcctgggttagggagcgccccgtgttcccagctcctgtcccaggacctctgccccttccggacctctgaatggcttggtctacttctctccgaccaagcccaaccccgagtaccctgtggtctcccagctgggaaagtgtggacggcagtgtgtggaccgccgtgggcacaccgtcctcaacgaagagggtcctctcccccgcgtccggctgctgctgctcctcaggcttttattcccttacttcttgctgcacttttttgtcccaatccaacctttcctctccctcccgccacccaccagtgccggtctcgctgagcacccgtctctcaatcccaggatttgtacggggattctgggcagcctttgaagagaggctgccgctcagcttttctgagaggtcgccgcgcgaagtcttgagccctccgaactgcaaggacctgcccctaggggcacgggtccgattttgatattgaagggatgattttgttggaatcgtttgccttaaatgagtgggtagagcaatgtctccataaacggggaaggggacgtttccacccctcccaacactatctaataaagacatcattcgtcacaactctaaattaaagaaagcccgatcaaaccagagggagacttccacactcctcccctaccccgtggagattttttcttttttctgcagtgtcgaacgctccatgaagggctcaccaaatcgcctaacctcccggctatctctcccagacgtataataaaattaataacctaaagttatatataaataaggacaatttcgttgcatttttccccgcaggaggttgcccttttttcgttgcccaagaggaaaatgttcaggaaactactgtctcaaaccaatcgattttaaagatacagtatccttttctccgtgtaacgatttatgcggaaaataaatctccaagctcaagagcaaatgaaaagtttcacctctggttcctgcttgaggaacaaagaccaactgggcttgccgcctaggggaaagtggggccgtgggtatgggcgagggggcatctggccaggcgttgggcacaatggagcaggggcgagtgctttcagcattggagtcaccattcgggggccttcttagatccgtcaggccggacaaccgttcggattcggtggccgggaaataaataagccaattcctttggtgactaccccccgcggatttccagacccttagctaaatctagccacccagaaaggggaaaggggaaaaagaaacaatcaacccagatgcccccggggaggccagagcaggcatgcactggaattgataccttgatggtggtttcgggcaggttgagtgccgcggccagctcgcaccggcggggccgcgacacatagttctcccggtagaactccttctccaggcgcgcgatctgctcgcgggtgaacgccgtacggtagcgccgcacttgatccgcgccagagccggagccacccagcgccgcgctcccgccgctgcctccgctgcctccatgcaggcttccgaggcctgagcccgacgccgacgtcgtggtgccggcagccgagccgctctctgcgtaccctggcaaacaaacgaccaacagcgcatgagtggctgtaggaccaacagcccggcgctggcgctgcgcgcggatcggggaagccccgtcaggaaggagagtcgctgccggaattgatggggtctgtcatgcttacaaattgctgccgttaatggaatcaataaagtttggggagcccttcataagcaaataatagaaacggaattaggagatttcttttttaataattagaaattttcaaccaaggaggaaaagtggccgagggaaaatgcctacctctgggcgcagtttgggaagctctgggtttcccatggtctggagaccgcagggcagctttttatacggcctctaacctttatctgagtcttcggggtttcaaatattttaagagttccaacacagcagtagctcaaacccaagccaatagggggtgaaatatacttttcaactctttctcccgctgacctaaacagagacgccggcgaggcttcctccgacttacccagaagaatgccccctccagccctgagggcacaggggcaggggagttcagagtagttgcccagggtacctttcccaaaagcaactcggctgctgactaggggtctaccggctcgctcgggctcttagacacgagcgcagaaacattttctcggactcaggagcgagggcgggtgggcctggtgttccaggctccgcaggcctgagcctggcgggaaagctcaaggagcagaactggaaggcacggtcccagacatgcgtcccgcccccgcccgtgctagctcggtgtagcttgcctgtggagggtctgagaggggaaaaggcaccgggaaaggctggcgggggccgcggaggagcaaagaggatgggactggagagcgcggtgcggccggcgcggttacctttgccattgttttccttaagctgagcggcgccgaggcccccgggggagcgaagcgcggagcagcccacctccacgtcgctgctcatgtcggcctcagcggccgcctctgaataatggcccggcttcttgcggctctcggcggcggaggagatttcggaggagacggtgctttcgctgcccgtgtgctgcaggttgaacaaagtgtctatttcgaatttgcccttggcggggagttctcccagagcgctgtgcaggggggcagacggcaggcgcgggcttaggcgagccgggtgctgcgaattttccagggcctcgagcacagcattgccagccgagttggacaaattggagaatctcttgcccgccgtagggctgtgcagccctctctccatcagaatcatctcttttcttattctttccatcatctcagctttcttaaaaatgtcacagtggccctgctgtcccgtcctaatgataggctgcgcctagggctaattctcattcagccccagcgaacgcctctaaatattattatcgctttcggagggaggcggaaaaattgtgggatgccagagcgagggaatgactggtcaaaatgacccatacatccttccgatcccgagatgtcattcatcaaaaagtagcgcccgctcgtcattaaggtacgaatgacgctgttcgaataatcatttattgtaacaggtttataagcaaataaatacaccctcctgtcagtgggtaatgaaggcagcttcagagcagacaaatagatccaggtaggaggcgagaagagacaagtgaggaggaaggctccggtcctttgcccgctccgagccagttctgctcgcccgggggtttggcctcgggggtgaaattgacagtctgattaatagagcgcgccgcggcacatttcccccttcatttaggggcatcattacgctctcagtttgctaggttgccccttaggtcctaatcatgcagcgccttcttcatttttccttggacacagatacgtattaaataatagataatggtttgactttccagagtaggtcctcgggaaggtttggtttttttttttttttttttttttttttttaccatttacaagctgggggcataagtggggggagataagggggaggatgcaggaagagttgcgtaaggagaagaccttgcgcctctcctatctggattacttatctttcggatttcggaaccaaatatgtattttatttaacaaatag

SEQ ID NO: 3 - DNA, 5332 bp, Homo Sapiens
ctagtttcaaaccctgcacccgcactctccagacaggaagtccctctccctcgaccagggattgagggagaagagattcagaatgcatctccttgccctaggcctttcgggggggacatggccttagacagtcaccccgaaattgggctcaggtcctcacagtaagtcgagtgtccccccacatccccaaccccggccctttcactaaagtttaaaagattcttttgttcctcaggcttctcccgcttggttgcttccattattccccaactgcggaaacaccagccaccatatgtccgccggagaataagcgtgagtgtcgcggtggacagttgccgccaaaggtgtccagacggatggcattctcaaagtagggatcttagcatcctctccatacatcatcacccaagaatggtagaggaaagagtaggagtggggttacagataggagagaaaggaggttgaggccacaaaattggcatttctctaattatcaaccccctcctccaccatcctgccaccatttgttatggcaaagttctctttctgtgccccttccctaataaagaaatcctcagtcagcctccacctactccttttgatttgcaggaagccaaactgccagcagattgagctttctaagggatacctttgggatatgttggaattctgatttgttcaagatgatgacggtcatcagtacaaatcagaaacaatgccactcttcagggtgtcatttgtaagtgcaataacacggattcatttgcaaaacccagctaaactgcgtctggataagtgactagatccaaacgacaaatttcttccatcactcagctcctcccaagctctgcgggggcagcacagaagactgctttagggtgaaactaaggctcagctcaccatttgtgccagcttgagggaccctggaaatgttgactctgagaaaaagacaaaacaaaacaaaacaaaacaaaacccaatcacaaaacatatcctactgtctacaaagcaaacagaaacacaaagttgtttccaaaatcaccttttcagcaaataagtatgtgatattctgagcaggagcaggagggagagaaagactgccacttaaaaaaacatgaaagcattaagtaataatttaaaacacggctgtttagaaaaatatttatatttattgcagctgctcaattggcctcgttaaagtcggcaagcatttaaattgtgttacaatctcatttaaatcccgttccgttccagcaggctgaagagcttgaatagaccaatcacttcataatgatgatgaatgagaaattaattcagatacaagcaagacaatttaggccttcatctgtttaaatagccttccaatattattcgccatcgcgggtcacagattgaatcaattgtccaatcttgtgaaagtcatatccttgcgtcttcatcgagattatttatagcgcagtgagcgctgctgaaaggtatacgctgttaacagggacaattacttaaagggaagcgtttgtaaaatggaaaacaaatgccggggttggtaacaaatgggatcaaaagcagccattccaatctggctccccgagggaaaggagcgggcgtggccctgtaggattaggggcgcttctgacctccccaagacccaggtgaggccgagggtccccggcgcgccagcctgcgccgtggctgtggctgcggtggcgactcgggccgggcctcgctctcgccggcttcaggttcccgcctccctcgcgcaggcagcgggcgcgtgtggcccgggctgggcaagccgaggaacagcgagcccccggacgctgactgcaggacgtcccagtttgtgcccgggtctccgtccctccccgtacggggctcgtacccccgggcctgggtctgacccacagggcgctgaggcctttgtagctgaagtcggaaggcctcgttgcgagcgcggcacaggttgctggtagcttctggactctggaggcttggccttccttctaagccgatggcggggaaagaacctcgtttccacagcttccccgacccccgccgcttgccatttggggacgggaagcgcgcccgggtcgcttcacgtccctctgggccggagccctttccatggctggctcctctgggggcccttgggcctgtgagcagcgtctacttccctcagagaagaatcctttccttcccccatcgaagtgtccctttctgtatcctgaaataacccctcctgggtgaggccagttcccctctgtcgccctcctcccgcaggcgtccgggagcctcgtgaggaccccgtgcagttgagtccaggcgacaggtgcctccccaggtgtctacttgccctccctcaacctgtttagggaaagaccagaacgatgtgcgcggggaggtggttttgtttctcccgaaactggcgctcttgggtaaaaccgcgtgccgcgtctacgcgggctctgttagtgtgcgtgtcccagaagagtgggccttctaggcggcactctttggagaagtaagtgaggtgaactcagaacagagaagcgggaacgatcgtttgatgtgccgagccggaaaaagagaggagagggagaggctcccagcgagcgcggagacagaggagcccacgcggcacagcacgagccctactcttgcccgcgtagaggtgtgtgtgtgtgtgtgtgtgtgtgtgtgtgtgtgtgtgtgtgtgtgttttcctctgtatttctgtgtttgaaacaaaagcccaactaacggattcctggtgctctgaggactcactcccgggagcgactttgatgtattgctgtccaattagtgcctttaattggtgtcctcggagacaggcaggcccggagctgggacagagcctcctctcgcctctcctgcacactggaaaggtaaaatttataacacactgtggccaccccttgggagagcgaaagagagtgggaggcagggaagaaagggagagatgcagctgtttgcagaggacggagcctccagccccgggggtcgtggggaagggcccagaccaccgggttcgactcagttttctgtgtaagagggttcgggccggctgagtcgctgaggattatgaatttgctcgcagaaaggcctagggagctctcattgtctgtacaaacccaccccatgtggtctaccatctcgttaataatggctgtttgttaacaaggatgcggaggttaaataatccgggtggaagattaaacacgtctcatcaaggcgcttggaagccgcgcggtgcagagacctgcgctggagccgcctggctcactggagcctggagggagatgggagcacagtctgcaaggagccccggggtagaagaggaggcaaggtctagtctccctcttcagggtgtcctgctatgccaggacaggtctaactcttccacatgtcaaacagaaaatccacatagaagtcagccccaatgaggtgtggaggtcaaaccctcggagtagttggctggagggcagacatggagcatctggggtctgaaccaaaggcccccttttgaggaggggtggccatcccctgcctcccagtccttacatgtcatgcatctggcaatttgtgcctacatgggattagcattggattagaagacagaagatgtggtttctagtctgggttctgcccctaaatcactgtagaatttttattacattattctcccagcttcatttttctactgtgtaagagaaaggagatggggcttgatgtagatgatgtacagcatttcttcttttgtccagcttcccaccagagttagggaactgaacaccttataagatgctctgtctcccctaaaccttgcaggatgcagtcaaaaagaattttatttagcaaatatctgagggcctactctgcaccagtcatggtgcagtatgtattttttaactgagagcagaatatcagttcatattcccctgttattctcaaatataatgttttataacaaaagatgaaagagaaagaacttcaaagagaatagaataggatgggtatgtatgtacagggtagagaaactatggaggtaaaggtaaaggcattgacaaaagctgtgaagaacttgttgaactggcaaggaagtcagtggataaatactgcagaagtagctccttaacagagatactatgtaggagagtagagagaaggtcccctcctgaatcctggtgatttggcagagaacaaaagggtaagggttgcagaatttgactaggaggcccaagttgtatgcatctaatattgccaatttttggtttatatattctttcagtagttggaatttctctctctctctctctctctctttttctttttgagatggggtcttgctctgttgctcaggctggagtgcagtggccccatcaaggctcactgcagccttaaactcccaggctcaagtgatcctctcatctcagtctcccgagtagcaagggccacaggcatatgccaccatgcctggataatttttttttttggttgaggggtacagatggggtcttgctgtgttacccaggctggtctcaagcttctaggctcaatgaaccctcccaccctggtgtcccaaagtgttgagattacaggaatgagccactgtgcccggcctaggaagtttactctttagctaattttgaaacattactttctgaatccaccaatcaggaaactcggctgctaggctgggactcttcaagcttctgggtgatgggcatttagcctcaaggaaggcaatgatgcttaaatcactaaaccatgtctcagtttctgtgagtcaggaatctagtgagcttagctgtgtgtccctggctccaggctattccactggggttgtggtcttatctaaagactcagctgggtgaggatatgttccgggctcactcatgtggttgtttggcaggattcagttccttgctggtgggctatttggctgaaggcctcagttccttcttggtggttggccagaggtttctctgttccttaccatatgagcctctctatagggtagcttataaagtggcagctgtctttcctcagactgagtaagcaagagtgagagtggaggggggagaaagcacccaagacagaagctacactcttttggtcatctaatcttggaagtgactttccatcactatgccatattatatttgttagaagtgagtcactagatccagcccacactaaaggaaaggggattacagaaggcatcaaatccaggaggcagggatcactggggactgtcttagaggctgctgcccagaccccttttatataacagctctgaggcttatatggt

SEQ ID NO: 4 - DNA, 4215 bp, Homo Sapiens
ggtgcccgaccaagcgcagcccgcagtctgggcactgccaactgactccaactccttttatggtgagaggatggattcttcgttatttccccgcccaatctggtacccacccacccacccacctaccacgtccgctgggcgcacccaagtctaaccccggggcgcacgcgctagcgcagacaccgtatttcttctcctttctcggccaaccctaggtagaatcctaaaacaactgccctctcttccacgatctagatgttgcggcccgcggacaggaggttcaagaaatagtacactccgagcggcaggcagcgaggcggaaacggtcgccggtttcagtggtggccccactggaagccgagttcaggagcggctaagcggtcgccggggaaagcaccggggcttcccagggtcccctccgagttcccactccgcacctccgagggcgtgaaaaccacgggagccgccccaccccgcgcgcccagccccgccccagcccagacaccgccccccgccagtcttccctgcggcgcccagggaggacgcgctccgcccccttccaatccggccaatgggcgcccgggcagcgcgcggtttgcctccgcctccgccagggaaacttggaggaggagaaaagtttgtacagagggtggaaaggcgagagcggagctccaagcccggcagcccgagaggaagatgaacagccccaggccagagcctctggcagagtggaccccgagccgcccccaggtagccaggagcggcctcagcggcagccgcaaactccagtagccgcccgtgctgcccgtggctggggcggagggcagccagagctggggaccaaggctccgcgccacctgcgcgcacagcctcacacctgaacgctgtcctcccgcagacgagaccggcgggcactgcaaagctgggactcgtctttgaaggaaaaaaaatagcgagtaagaaatccagcaccattcttcactgacccatcccgctgcacctcttgtttcccaagtttttgaaagctggcaactctgacctcggtgtccaaaaatcgacagccactgagaccggctttgagaagccgaagatttggcagtttccagactgagcaggacaaggtgaaagcaggttggaggcgggtccaggacatctgagggctgaccctgggggctcgtgaggctgccaccgctgctgccgctacaggtgagatggcgttgggctgacgttggggtcaacgggtagagaacgcagggatgcggccctcgccgaagagagccaagaagggaagagcgcgctctccaaattgcttttgtaacttgttttcagtgagcattttattgattcagaatctatcgagaatagcactagcgagctacttttcccttgagatgggtcttattcatcttggcaatggagtgagttggattgtggggaggaagaggaatgggaaaatcagtttataaatattaatgtcagcaagagtgtgctgttggcaggacgtatcgcgagcctggagattttggtggccgcagttggtaagtggctacaatccagaaagtaggatcgagttgctccccttgtcttatcagtgtatcgtttctcgggcgcgggtctaacaccttacaagtggtaatttccgctcacggcagctttgtctctcttctaccatccccagacccagccttgcactccaaggctgcgcaccgccagccactatcatgtccactcccggggtcaattcgtccgcctccttgagccccgaccggctgaacagcccagtgaccatcccggcggtgatgttcatcttcggggtggtgggcaacctggtggccatcgtggtgctgtgcaagtcgcgcaaggagcagaaggagacgaccttctacacgctggtatgtgggctggctgtcaccgacctgttgggcactttgttggtgagcccggtgaccatcgccacgtacatgaagggccaatggcccgggggccagccgctgtgcgagtacagcaccttcattctgctcttcttcagcctgtccggcctcagcatcatctgcgccatgagtgtcgagcgctacctggccatcaaccatgcctatttctacagccactacgtggacaagcgattggcgggcctcacgctctttgcagtctatgcgtccaacgtgctcttttgcgcgctgcccaacatgggtctcggtagctcgcggctgcagtacccagacacctggtgcttcatcgactggaccaccaacgtgacggcgcacgccgcctactcctacatgtacgcgggcttcagctccttcctcattctcgccaccgtcctctgcaacgtgcttgtgtgcggcgcgctgctccgcatgcaccgccagttcatgcgccgcacctcgctgggcaccgagcagcaccacgcggccgcggccgcctcggttgcctcccggggccaccccgctgcctccccagccttgccgcgcctcagcgactttcggcgccgccggagcttccgccgcatcgcgggcgccgagatccagatggtcatcttactcattgccacctccctggtggtgctcatctgctccatcccgctcgtggtgagtgaccggggctggggccctactcggcctttttctcgcatccacctcccgcgtccattccccgctccctgctttccctctgagtccttggcagtgaacgtgtcgcctttaggtcggggctgggattcccacactgtttctcagagcaggcccaaccctctttgaagtcccaaccctaacgagatttagcaggtgctttgcccctacatcccccagtttatgttcccggaagcctgggtttctttctccaccgagacagcccttaccccttgctgcctgacactggccgagtcttccaagaaaaccccccgccccctctgttagacgtggaggggagcctgctgtagtgtgacttagcccattcctccgtactgtgaactgtgaactgcaaaacctgaaatgtcagggatggtgatctgttcgttgtaaaccatttttaaggaaagtggggtttttggtgttttgatgtatgcaaggtttcttgaatttcttcccccgtggattgcgtagaattttaaagctagaagagatatcaagaggtgttttagtctaactccctcacttcactgagggagtgaatgatacgcttaaaataatccagccgaacctacacagtcaagctaggctccctgctctttaccatggtgtgccctgggagggcagcttaaagcacacaaattctaattcatatacagggcagggtccagactcagtttctttcattctgtctagaccaggaaagcaaagtttctcagggtgactaattatggacaggctgatatacatagggtatgggatttgaattctcgacaactgtgcgaggtacagtaccattttagagaaaccgaggtttagagatggctgtctttgtttcttcaagccaaagctctacagcttgtaatggaccttaggccgtctgaggccagacccagctcatgtgttattacatcacgtctccctcgtagaacatttctcattttggcgtttgtaaagcgtgggttggagttttggtacacttcatttttagttcatcttttaagaattgcctttggattaacttttaaaatatgataaacagaaaggctcaaaccctacctagttttctactttgcctgtggctaaaatggaatgcaccagaagcagatgggcagaataatgcaatactttatctagagtttctcttgaaagcaactagttatgagttcttccatcttccaaaacactgcattcctggaaattctaaactaccaactcaaaaagagataactgctttttcttatgcttgttgggaacaagagaatataaaatgtaatgggctattattccttccttttccttattgatactgtccagggatctttggtgtaaaaatatatctttgataaaagtgactgtaaatggaaggaacttagagggggctcagagccagaatacagtaggttcttaccaatttgtataaacagaagtaaatataataggccataagagcctttaagccattccaggacccaatataatttacagagttaagtcacacttgagccacataaatatattttactgtctgtaatggcaacctagaataaagtgagattttggaagaaacaacactgctcctgatggg

SEQ ID NO: 5 - DNA, 5473 bp, Homo Sapiens
gtaatgttaattagcttcatcttaaagaaaaaccaaacaccagagcaaataatgactcctttgcggagaaggagttgtaagggttggggagaggtaattagtgtcataaaagcctcactacaaagaagtttagaatttctctgttctgctgtgcagcagagtgaaacacagtagcagaataattgtgcaccattatcatgataatctaatttgcttctttagaaaaagccactgtttgcagttaggatagtaggaaaacatctagaaaataactaaaatgtaaataaaagtatgaaacaacaataaagttcacttcttaagagaaaaaaagaagagcactcagcgaaaggagaatgaagtatatataaagcaagtaactcttaggtactttgttctcctggatgttacctgcttaaacttgacaacttttacaggcagtatgacagattttttaaaattcaaataaagcttgcttttgtattccactttcaataataaagcatattgattgactcacaaattaaagtttttaaaaccccattaaagtaaaaatactgcttcagagctttcattggtatgtttttgaaagcaagtgtcatagtcaatgtaaatcttcaaaaatttctctgctatttagtacaacagagggtggattttgtgccagggtggcatcctttgtgtaattcacatggcctgaggcttcttgcctttttttcccctagaagagttggaattaagatactaataatcataactgtaataattatcatcatgtttttaaggggttgctgagcctctggagatctcagtgcacagagcgaagcaggagaggcttaaaaaggaaggctctgctgctgatgctgtgatgaccaaggcagcctattattacttttcctcttcaacgtgactgctctgtttttttttttcctgatcctgttacaagatgtggggaagccccttaagaattgtgcatagttcgctacagatggtggtctctgtgcccagagaccgaaagagtatctgttacagcgatactttgtaacagctgcagatgtgcgggcctaaaactgctccatgtgttcaaaccaataataactatcattttattctattttattatctgagcggaaatacaatctgaaacatttaaatttgttccccctaaagctagaaggatatgtgtatgtgaatgtacacaatttgctcctttaaatgcccccaaagcctatttttgctattacatttgcctccacaaccaataaagaaaatctgtttcagtcctaacttcattgggtatggcacgtgctggagggcaggctttggaaatataaatactaatatatgtggtttgttttaaaatctaatgtatttagggtcagtttcgttgccttggttaaatgaatgaacaaagagtgaccaaaatgcgtttatttctccgctatttcacacacagtttgagatcgaccgctaacagcagactgtaaatttctgcacttaacagttactaattttctttatagtctgcacatctataaacctaattgggatatccgcttgacaaacctagaccctgcagagcagactttcaaggaaatccaactccagagaacaaaatactctttggaacttttaaggcatccagagataaaacgttttctgtgggatttttttttaagccttataaaagtaggcccattaggattaaaccacattaaagccagtgcgaggcaaggggggtgtggtttatagaaactctgggagaaagcccagcacagctttcttcttctgggaacatatgttaggatggaaaaaaaaaaaaggaggggagtgctataggactaagatctactttggaaaataagacctctagtaaagatatctctttccttctcatcttacaccagacactagaagcaccacctcccgagtgtgtcccccaagcctctttccaaccccaggctctctctgctccctgggccctcgacctcctggcagctgggtacctgcactcgggcctccgacaggcccagtcgctggctcagttcctctcgcatgaaggcgtcgggatagtgggtctcgtcaaaaagcctctccagctcattgagttgttccagggtgaaattggtccgacttcgcctctgcttgattttggtctggccttcgtcctccatccctttcgcatcctctttgcgatctttcagctccggggacactggagggggcaccccagcggggccacacgtgcatccacacgaacacacacacacacgcacacacacacggacgaaaacagcacagcaaatcctgttaccagatttgtcgcaaaaaagaatagagaatccttccccctcgtggaatcctggtccggcttctcaacccacccggaggaagaatatcccggagaagcgcaaaggtcaagtctgagcggccgcctggggcaaggtgggcagtcatccaccacctccttcacaaacgtacctcgactcaccgcctcactattcaccccccagtcaccggccttccccagcaaacaccaaatggtttccactcactttcgcactcacttgctccgcagcactcacagaaatcaaaggcgcagcgccaggcctctcacagagcaaagtctggacataagggcgcggcaaggccacccactggcctctcacaccggccattcccagaaggctggctcgttctcaggccagctctcaccaccgctggctctctgcctaccgcaaacttgctggtctaatttaggaacaattgggccgaaaggtatcagcgagagcaacagaccccggtgttgtgccgcacagggagccgcatccgcagacgcccctcgctgcccctgggctcgggccaaaccctgcataaggtcccctggacagccaggtaatctccgtcccgcctgcccgaccggggtcgcacgagcacaggcgcccacgccatgttggctgcccaaagggctcgccgcccaagccgggccagaaggcaggaggcggaaaaccagcctccggtggcgggcgaaagcaaccgctctttctgttctctcttcgccctccctcgtggaaacgcagactcgaccctaaacgcttaacccacagagatcaacaggttcaagcggaatattcgcgatcctcggtttctattggttgctcaaagccttttcatgcaaccagcagctcggatgtttaataaaatatgaatttttctgctctgggtttgcacacatccgttgccactttcctgtccttctcctccctttaaaaacaggagctcttctagtgtgagcatatacagccaccatatatatatccccctggaacctttatcctctgcgcccgaatcagagactccgggttttaagaagtcaaagctgagtttagatagtcgaggctgtttgcagttcttcccagcgcaggatccaggccagcatgggtgttaaaaatcatttccggaagagccggtctgcagagaaattaatacttgccctgagcttggaaatcaacaatcccaggaactgcgcccgccgggggttcagacctgaacctcgccgtcaggcgcgctggcgaacctgtagttcgggcctgtagttgtggactcatggccgggaggctgcactgggcaccttgacggtaactccaccactttacaaatttaggaagacctggtgctggtttggaggaagaagagtcgctagatctcggccctgccgggcattctagctacggtgatcttaaatattgccgtattttctagttctcagagttagttttgtggacatttgtcctttctttaggaaggaacattatagtaaacattatgggccaatttaatagcaaagtatttttactgatattgtattgaaatttaaatatgaaaacacacccttcaaattctgccaatgaggtgggaaggctttgtctattacatgtcatctacacagtggatgccactcaaagttttggggcttcgaggagatgtccaaatttcaagttgatccatagacttaataaaatctctatttttgtccccaaatttccaattactgatctaaacaggaacagaccgtgtcataaacaacttaattgcttgcttaaatatgtgattccacgcatgccacatattttcttaattggaaaaatatggcagtacaccagttactgcaggcaccaagtgccaaatcaattttattgttgaactcctttgaattggtatagaacgctctgccattgagataaagacgtttcctaacactgagctagcaccaaaggatttttgctctaagagaaccgagtactgggtgattgaaaacactaaaggaattgtgtaaatatagatccccacctcccccgccgccccccccccccgcccccaacacaccaagaaaccgaaacgcctcgcccgggagaagcagcgtagcctggacctcagctttcgttggcttccttctaccttgaaagagaatgggaagttttggcccctaagatccaaagattcaggggctctgcggagttcgaggggtcttggcggccccaaacacctaggcgaccggagggttaagctttccacctctgccccttctccctcccggcaaactctgcgctagaggctagctttagtcccgccgtctggttcagcaccccctcctgcagcccggccccgcgaacttccacgtccgcctgcgggccatccgggctgcgggcccatcctcccgctggtgaaaaatgcatttcggtggaatgggaacatctgggaagggcgcgcacaaaccccacacgcttccccccacgccacccccacaacacactaggaccccacccatgaccgagcataccaccggacccccacccttccactatcactctagctgacaaagctggggtccagggccctctccgtgtccctctcccctccccgctgggcctcggagtcctctcccgcccgagaggagtccggaaggcgggaaggggaaccgctgccgggggtcagtcaggtcgttaccctccgtcagtcgcgggctgcccggctccctgcttctctcggcggcgcccatgtccagctcccggacgggagagcgccctcctccagctcctccgcctgctcctcctcctcctacacctcctccgcctcctccgccgccgcctccgcctcctccgccgccgcctccgccggccgcccggactgccgggctgctgcggtcgtcgcggcccgcctcggtgcagccggtcggctccttggccccgcgcagcggcccgctctccagcacctcccggtacgtgatcgcctccttcttctccttcactttctggtcaaaagacttggagacgaacgccgtaagttcttccatcgccgccgcacgtcagcccggcgctcaacctctgccagcagagccccgctctttttttccttcttctttttttactgctccagcccccccaataataacacatcaatgggacaggaggtgggg

SEQ ID NO: 6 - DNA, 5328 bp, Homo Sapiens
ttgacaagagaaaaggtgttgagggcaggtcgcgctgtcttatttacagcccactgcttgctgtagagtctttgttaggactggaaagctaatttagtgctgatcaaaagcaccacagagttaaaggactggtaatgactgctaatttcatttcagcctcatgcatccccaactgctgtaattaaagacacgctatttaaatacaggtgaagggttttttttttttaagttgggttgggggggggtgggtgggtggattacaattttatttagatcttctactctacttgggtgttatgtagtcccaaattagattttattattattattatttagagccgctccttgtcatttatacctggctttgcagaatcggaagtgtgaaatgtgtcactcacataaaagcccctgtttaaagaaagggtgggacgggggagtgcagaggagtaactatttaggggtgatttaaatatttaggtctcctttttttctccttcaaattaatagaaaggccttcgatatagttaaaagtatttgaaactgggggcaaggttaacaggccaaagggatcagtgtcagctttttaagtacttctaaaaagatcatgtgaacagatggaaaaatatatttttaattaaataatttcccccacactatagctgcagtgttggctcagaaaccgtgtaatttctcatccgataggagtttctttatgagaacatcaaaggataaaaagctctgcattttcgtagttggttaaaattgataaccacccccccatgcgcgcgcgcgcacacacacatacacacatatacacacacacacaccaacacacacacacacacacacacacacacacacacacacacatatccccaaaaaagaatttagcctttaatctctttttatccacgaagactaaagctctgtactcgaccccgcgagcggctctcgccttccggggctggaacccgactcagatgtgaagcggcactgagccgctgcgcaggttcgtgcccagcgccccctgttggacacagtaggagctgcgcagcgccagtcccagaaatcgctggaatcctgctctggggttagagaaaactcttttattgccctccaaaaaagaaacgggatgcgaaaacaaatttttatatccttgaaaaataatataatattaactcaataaaaaactaaagaggcgatactacaattttaattcaataaaaaataaagactgtcctcctcacatcccagccatcccccacccggtttggttttgtaactcttttgaaaggttctgcgatggtaaaacaggtaaagaaaagtgacgaaaaacaaagcatttttctgtagccgtggagaatcaagcaaagtatacttcctccgttttgtccacatttcaaaaaattaaacggaagatgctgctgcttgctgttttgacgttgtcagcagcgtcttgaatgccctcagaggtcctgcaagtatcgtaactgagccttcgagtaaacgaaataacttgcttttatgtgtttatttccagagtataattaaaagaccagtctcttctttgagtgtttcccatcccctagaccaatcctggtcaaagtttttccttcccagatactggctaagaaacacatactggctaagaaacaggtgcctggtatcttttttctttcatcttagccgtaggatttcggggaaggtgtgccaatggtagggaaggttttctttgaaattcagcatttcgttgaccaggaatccaaattatcctagggaagggggagtatttttacacttccaaaaaactacctgtctacataataaagagctttgccttttttattattattatttcttcttcttctttttggtcagcaagtgagggcaaaagtagcctttgaattatttcagaaagagaaactgtaaaaatggcacatcctctgaatttaaaacaatagggaaatgtgggtttgcttaattgtttaaaatcaaatagaaataattactgtgctaaatgaacaagatgttttaagatttacatcttcagggttatggttattgattttaactttacccttaagaagtttagagatcgcgtttttaaagtttgcttattgacggaaatcggcttaatttttcataaaagaatggctttttaaaatattgaatactatggctatgcaaggtttatgatacctttatgtttattcttcccacctcccaaaattagcgaattcgagataacatttcaaggggaattgctatttagtgcgatgagagatgacttctccatctggttccagaattagatctcggcttaggttttttagtaagtaggttcagatgcaatggaaggagagaagaatcaagccttttgataaaatctctaccccgaattctatggaaaagacaggcaagcgggattccagccacagcacccccaccttttgctctaccaaaaggcttgtccccattacagaaataatatagtcggtgctagttttgtgaacccgcgccaaccgataaggtaagaaacggtgcgctgacagccgaggtccgaaggctgctcagtggttcccgcagcccgtggggtagggaggccaaagccagcaaaatgttggaggcgacgccagaaagagagtatatgcctgctattcggaagtgatgtcgaacgtgcaatagcagagtcctggagatttccaccccgttccgcacccagggatcccagcctgtggggtagcaggttgttgggtgaaggcaggagggagaagccgcacctggctgagggcgggtgggcgtgccgggagcgagtgcccaactttctagggcccatggagaaagcataacccctagttgaggaaagagagctaaacaagtgggtggcccaggcctgggaatgccacccagctctcccgacgcagtgttatttctgtggtcccagggggccccagcacctgcccgaatcccactccccaaggccgccagcaggaaggcagcccctccatctttgagggctgaggagggggcagcgagtgacttgattccttagtagcagggaaaaccgcagcggctggcaacgggccgcgtttctccgcggcggcaaagcgccctttaggggcggggcgggcatttttggtctcctgtcccagcgtccaggcctgagcccgcgcgggttggctgggcgccctgctttgtaagtaaccaatcttgctggattctgaggactatccaggcggatgggcccacttagcttaggcccactgagaccctgccaactcctcagacccttttccccttcatccctcacacctttcatgatgaacccaggaaagaacccgaactctgaaaaacagtacatgtggtttgaagtttgatagttatttgggtgtgagggacatgactctattaataaagactaagattcaaggctgagctctcatttattaaatttgctctttcactctgttttcaaactctggagatctttcagtttcgttgctccaaccctgacacagacaaaggcgccagggagaaagcccaggcgggcttgaagcagttgaggtatagactgatactcatctctccatcactcagacgggcagataagcactgccagactgggggtcctaatccagggcccagcggctacgtgggttgctgcggggtgttgaaaccacaagtacaacttgacaccattgagcccacggtgcttgtcaataatctgtgaattaggtgcagagattgtcactgtagatcataacagtttctgaaggactcattacagcctatcgtgtcaatgatcttcaaattaaggaggggaggtggggcgagacgaaaaaggagtggggagagccagcaaaaagggaagaagggtgggagggaagataaaagtcagagccccagctccgaaggagcctttaaagattatcaggccagcgatctgagaattccattgggatgggtttggaaacccaactccatctgagccaggactggaagaggggcgctgggggcaagcagaagtgggcccctgggaaggccgacttctcaggcatttcttttgaggccggaatagcttttgggagagggttctagatgtcaatgggaggccttgaggatgccagcccgcccaggatgggtgtacactttgatttagagcactttccagggcaagccgcagctgcagatctttgaaaaaagtggtaatagtttcgtttagggatgatggtgattgtaggatgactttttttttccaatggtttgctttaacttcttttcatgccacaggtgaaagctttcttccttttcctctgatagtattcctgtctgtccctcacatgttacgtagatctaatttctttccccaacttgtttttttgggtgccaaacacatcagccctctgagattttatcacttttgtggtttgtattgagtccaactgtaattctggaaagggaacttgtggataacacagtagcagtatgttccataagattccagaagaaagaagactaaattccatttatgcggtgtggcaggggccaggctaagggaaagaggttttccctgcttggtaaattgtccttgcagtgaaagggtagcccagccttcactggagtgtcatttaatactggctagagaaaggttaaggaaagtgtaggtttgtttttcccacaaaagttgtggtcacaactaaacgaagtaatcacagttggagaatttaaaacaactgttttttctctaaaatgagggtaataaccctagccactggaaaattgggattctaaggaaaaccttttcctttggtataattaattgcataagatagtgtggtcaatcagagacatatgtatttagactcaagcaatgatttacaggtgtaaaaggtccagtggctttttgggctacctggagttcctactgatcattttgccttttaaaaaattttcttctaattttaaaaataaaagtcatagatttaatgcaactgaaaaccactgatggcagctcttcaggttttcagtttatgtttttaaagggaatttatatttaaaataattaaatcatttaatggtcacactacattttctcctggacaacagctgtagtgcagggatagaatcttaacttacattaaaattgcttgataattcagaaatggaaatgaaattgtgaattaatttctccagaaaatatttgagctagaatataagaaggatgttcatatataatactgtaagtaacatgatgattattatatgcagcttgaaagacctacacaaatgattatatactacttctgttgctataatttaaagtaaggg

SEQ ID NO: 7 - DNA, 4324 bp, Homo Sapiens
gtcccccagtatcaccatcctaaaggcacttccacttcctctatcatcagggaaggagtgtgcagttctgatttagctcctcagtggagtaaagggaatttagaggaagggggatttctgcagaaattgtcagttacacaagtaagttcctcttggttccccgtttcatcaaaagtgaaaaactgttcacaggagtgcccatgtcccctgtttccctatgcatcactagagccaagaggggactccgccagcaaggcaccctctgctctgtcccgcagatcacagtccccgactttcaccccattgtttgtgcaatgtgcagaactggagcccaaagcagcgggctcaggatcactctccaggcccggcgggcccatagactccttccttggctgggaagaggggctttcgtgaaagcagagcttgacaagccccagtactgtcatggtcaagatcaccaacactactactgctgtgctcacaaatatgaagaccacggcagaggaggagtcgaaagcctgaggagtggcagaggaagtcgtagaattaaacttggaaatcacgctccctgatggggtgatagtggcctttgactcggcttgaagggacatttgaagggtagacatcgtgctctgtgatccccatcgaggaatctcaggaatagatgttactgaattgtcttgttcagggacaagtggtgtctctcccagcttctcgtcgaccctgattggccatgttctctgcggcacggggctggttgcagtggccggcgggcgcctggtgggcaccccggtccccccaagggtcggctgtccttccccactggtcacacaagagcggccgtccttccccagctcgaagcccgtagcacattcgcaggcaaagcctcccaagtcgtctaggcagttagggagctctgcgcatttgccagcacggaggtacctcccggggcagggacacaacacatcgcccgagagtttgtcccagcgagcgccgatttcgtccgcgatgcaagtaactgagatcgggagctgtccccggcagagcgcactcacctcggtcccaggtggactgaagtccagagcggcgctgtgcagctggaagggcgcgcgatagctcaagttagaggcggccccggggcgcggcgcaggacacaagacctcaaactggtacttgcacaggtagccgttggcgcgcaggtggcatcgcatctccttccagcctgcgggctcgaccccaccggtggcctggagtaccgcgcatctccgcgcggtgcaggagcgttggggctcctccacccactgcagcgtgtcgctttcgagaccgccggggtcggaggacagccaggagaaaccccgcaaaggctcgttctccagggtgcagtgggaacgcctgcgctccagtgcgacccagaacagcaggtctttggagccccctccgggccctgggcctgcccgcaggagcgcgagcacagcgcgcagctcggcgcccgcacgcacggtgctgagcgccccacctcgcaggatgcaggcctcctcggccgcctgccgcttcatggtagcgtggtgcaggctgtagcaggcccccgaggccgagcagccagcacggtcggcagtggggtgttcgccgccgcccggcccgggccagagcgcctgccagaggaggcacagggcgaacgccggcctcattctctgaggccccgcacgcagagctgctcccaacttggatctgtcccgctcgaggacgcagagctgtgtctggagcgcggtcaccgccctctacagctggcttccccaacccggttccccctcccttcccctccgccctcgctcccgacggaccccccaactgccaagaatccccccgcgggcccagcggccaacagtttcccttaggccgcgacaggaaatgtgtgcggagcgctgccaggcccggtgcagccctgagttattctggggtcaggaacacagctggcgccgggtacaggggacgcagtcgactagaaggtcaaacaccctgcttagagcaagaggagaaattcgccactgggatgaagtgtgtggtttttctccgttcagggagtttcatcaggaccgcagaacccataacacgtaagcgaacataggcaggaaggacttgagaaaggaactggcttatgattataagaccacgcccgtctattgtgtttctgtccggagctgtggagttagcgtcagaataattcgtagacggctccagtgtttggggggcctgtgcctgtgggggaaaaatatgttgtgaaacaacttagcaactgcttttgccaccagaggcagcactatttaaccgcatatctctctatgggtctttgcttctctattatgtcaagagatttcaggagtcctaactactaaagaatttggagttgtttgggtattttaaatgggaaattctgcttcttccatcagcacttgctttagaaatttatttttcacttccacgtgtttctctttgagttagaccatattgattcattacagaaaggaaatgtatttctaggactaaatgaaaaataatgaccatagatcttaacagttaggttgttagctttccttgccactgtattggttcaaaaattcttcaagtttataggttatacataaatgagttcgtggccttataaatattcgagaacaactgccctatgtgtgattttagccttgaactattttagtatcattttctcctatgattgagtggcagcatttataatagtaagttgtaaacatctcctttaaggaaaattagagttccttaagaaattaaaatgtttattccattataatgaatattgtatactgtcaaaaaatatcttgtaatttgaaagatgggtgagccaatttctttagaattccagtgggtgttttgttttaatataaacatttcaactcagtgggaagtggcaaggaattaaagatgaataaagaagtaaaggttaaaaactgtactgttatgaaaggatttcttgttagcaacttagacaattcagtatcagtttagaaaacgtacattctatcttggttcataatggccaaatacgttgccatcagaaatacatagagagtttcagctaagccctcttagagatgtctgatgcttttaaatatctttaatcagaatgaaagttgccattccatggataatgcatataagctcactttgttttactgcattcaggttgatgaggggtgggagggaaggtttcaggatcacatctgtatgcttccatcttatttttaccataactctcattcttctttcctcctggaaattccatgtatcttaacaaacaacagtaagcctatgagtcatcatcatacttaccttgcttttgctgagtatggagctttgcactaggatttctctcctgccctatttcccaatttaaagaacattccttagtccttccttcagatgtctgagaatcaccttaaacgtggctttgcgtttaaattaggtaacttagtgtcttataagaaagaaacatgaaaatccagaaatcaaattgaatggtttttaaaaaatacttagtcacttgggccagctctctatagaccattgcaatcttatgactgtgtttgtaaatgtgtccatgtagtgcaatatttttaataaaatctttttcaaacttaagtagtcaatggaaatttcttagatagctttaaaaatcgtttgggatgagatgaggtgtctacagtaagaaagaatgaatagctggaaagcttaagtaaatacatgatctcactccctgacattctgtctaggggagtgggattatagcagagaacacattggccataacgactatatgagagtactgaccatgaccatgaccatatcatggaatgacacaagagttagaaaaaattagctcaaagtaggacgtaaatagttttgtaattagtttgaaatagacagtttatctgaccaaattagaaatggaggaaagtttctattttttaataatatttattaagataataatatagaaccattttacccccactggattccaaatgcctaaaaatcttataataccaaatgtgaatctattggctcttttacatgttacagattagagcaaccactttggaaaaatttgacactttttttcactaaaattgaatatttgcaaactctagcacttccatgataaggtataaaactaagagaaatttttgcacatgtacaacagaagatatgtaaaaaatgtttatagtgacactattcatattaacaaaacgttgaatcaatcaaaatatccaaaaacagtataaaaataaac

SEQ ID NO: 8 - DNA, 5683 bp, Homo Sapiens
ataatgctaaatgtaaattctttgttttgttcaatgttcttattttatggttggcaaacaaaaacaacaaaacagcattgacaacaacaacagaaacaaccaactgaagctgcagcttttaatctttctaaagacaataggctaaagtgaggtcctcataataagatgctagtcaccaggaaggaagccagggaaaatctcctcccagggggtaattgatccctattggcctaacactgcatgtagcactgagttaggaggctccatggagaagtgtctgcttcttttcctctgctgtcagaacaaagttcacaaacaactttgttttccccacacctttggagttagctagttagggcccctatttatgtccaggggaccagacctggacatttgtaaaagaactgaatatagatggatagctaagaaaaaaacaaatgttaagattatcattatttatagcccaatgatttagtaatctaaaaaaatccaagaacaacaaaataatccctaagaaggacaagaattttaaaacatgcagtttagaaaaccaaatttctcaggcctagagctcaagtaaaagaaaatctgagataatgaagtctggaacactgggcctgcattctgctcctgactctgtgcccttgggtaagacattgaacttccccaccccagattcatcctacaccctaaggagggtgtaggattttgtagccttcctagtgatggcatactattaatcagaaccttaaccagctctattctcactatcccagtaaaatgatgttaaaaattagacctcgtgacatgagagaagaggggaaattaattacagattacaaagaaattgtgggatctaagtttagggtgaggtgttttattgaacctctagggttggtcatagcacctgccatatagcaggtattcaataaatgatgtgtaatgggtggttagactgatggaaaggcaggccttcccagtgacggtaaaggacctggggcaaaagagacctgtggttgagtcctgatccccacacattagcacactgactagacgaagttataagcttcaatttcttcctgtgtaaaatggagataatacctcatagggttatgaggattaaataagaaaatgcttagttcagtgcctaatacacaggaagcacaccgtaaatattagttattattattactaatactgtgatcatatcttccatccaaagacttctctgaggagcagggggcatccagagataaaaagcctgcaggtgggaaatctgttagccttctagggcgttaggtttctgtggaactctgcacctcttccctgtcctagttcttaagaacagaaactctccagggacctctggtgaggtagccgtgggaagatgaggtgcagaagtaagctgggacctgtgagcctcaatttcggcctcttctgcgctgagacccaagcggatcttgcttggcctgtatgcgttactgggggaaatggacgtgggcctgagcgcggcaggtgcgagggcgctgccccggggccgaccaccctgcggggacactgtagctgtcattccttcttctgcaggcgggtaggggaagcggtggccaaagtgggagtcgaccgctcagcacagtctgtctgagtgttgaccaggaaagtccaggctctttctaaatctcgccgccagacctggtgacgcattcgcatgtatttaaggcgtttgcacgcagaacgttatcacagaatgtagccacctttcttaacggtccgggaaaccagaggtctctccagctactcagggtagaggaatttctcctatctccatgtgacatcttctgatttagaagaactaatgttagatttctcttgggcctttccacctacagctatagtcttccctttgtttagctaaaattgaggcaggtaggaaaatattattgggggcataagcctattagtgtgtaaacgtatttttatgaagtgtgcctccagggagccattaaaaactgacctctcaaccacagaaatagatgagattttgagaacattgagaagctgccttttgcaaagtaaatttgcaatggtccttgacgaaggggggtcgggggcggggagaagtccagccgagagaggagctcattccacgctatatttttgcagttgaaaagctgcctaatcatcgctaaccgcttcccgcataagagttctgggaagacttcagaaacaaggcaaatgaagacttttcactgcctccttcgggctgtcgcttccggaagccgaagtcctagcacgcagagcagcaggagagggttactttcaggcaattccactgagcaaaataaatcacttaatggcataacgttctggcttaaaaaattggaatttatcagaggcaaaaatatccttcaagaaactatggacactccgcgccctattcatttccatggcagcagagtatctgcatcttgagccacctatacagattcatgcctcgtatcgctctcacctcctttctttttgaagtaaagccctttcccaagaaggcggccagaaagtggaccccaccgggggaaaaagaaaaatgaaacgcaaatcagcttggcactgcttgcgtcttccaaaacgcggtgggacaaggctattgagtctatagctaattctttcatgtatataaaatgtatacatatgtatatatttttatatacataaaagaattcatatatatgtatatagctatgtggagccctgaagcaattctccatgcttttgtctccctcaagttccccaggtggaggcagtcataagcattataagccgccttagtgaccaccagggacggaaaccgttaattatcacgtttcctttcatctccaggggccctttggcccgtgacacaagaggcttcggtattggcgctttcccagaactggcccagaggagccagttcagagtgtgaggtcgggtctgcattgaacgtacacaccgaggtctatcagactcccccgattttagcgaagggtgctgactgctgtgctgctagaggctagcaagctccctgtgcgcagctgatgagtttcagcaactcgccacctgggcgcttttctttaaattttgggagtaaactgggaaaataaaaaaatctccacgtccactggctctctccccttctccaacttcctctttcgactcgtttgtgggagttttctcctctttgctgggactataatgtgatgcgcaatcgtttgtgaatgaacaaaagtcaccggcaagcagggagacggggacagatcgctgacggcagattgagggtggcagcaaaggcccggcctccaaggataatggggagccgttttccctcacgcctggtctctatggcccccttcgtcttccaggtaaaatgaatgttccttcatccatcatccgcagagtaccctcaggcgtgcgtagaatctgctgatgaaacctattagcgccgactgggcagctttgtggagccacccgaggctctccattgtggcctttgtctgcagaatttaagcatttacataatgcattagcacggaactcagcacccggtggggacatcgcgtgccaagcctggcgcggccaacgcttcagcggctccctcacccggcagctccctaggaccaccctcgaggaggcattggagtcgggctgcaggcgcacgggcaaagaacttagcatctcatccaagtacttcgccttccttggccgtctccgggaggttatgcttaaaaacataaaaataaaaataaaaataaaaataaagggaggcggacaaagtttcggtgggtgaactgaagctgggtccatgtgaccctgaagccggagaaataaacttaacatgaatcttgctttcctggcgggcgttgggaccccgccgtttttcatgccaaccgttggaagcttcgtactcaacggccacaggtgcctaggagcgcagagaggcctcgggttcaaatcaccggcgcgcagggactggactcgcgggtagcgacccccccaacccccccccccccgccctacacacacaccctcgcgccggctgaaagcatggaggattcagggcatttgaaaaaagaggggctgggcgcggtggctcacgcctgtaatcccagcggtttgggaggtccagaagggcggatcacttgaggtcaggagttcgagaccagcctggccaacaccagcctggccaacatggtgagaccccgtgtctactaaaaatacaaaaattagccaggcgtggtgcctgtaatatcagctacttgggaggctgaggcacgagaatcgcttgaacctgggaggcggaggttgcagtgagcccagatcgcgccaccgccctcctgctctgggtgatagagcaaggcactgtctcaaaacaaaacaaaacaaaacgaaagattcggtcaggaaagaatctgcaggcattcgaggcgctcgcactttgcaaagtaaatgcaatctctttattaagccgaagtccctcatatctatccttttagaggaaggtggtccaactcagaaatctctcccaagaggactttccaccgaagactaccgcgaagtgccaggaactcgccccagtcccgacaggtgcaggacctttcgtgccgccacaccttgggactctacctccctaaataggccacttaaaagccagtagtgcaaccgggatcccgcggcgataaagaatcactgtgcagaaccctggagctgggagtcggcccgcccccctcccaaagaaaccgggatcccgcgtcctccccgccgctagcgcagcgcgccagcggcgcccaatcagtgagctttccgggtctgtgacggccttcggctccgccccctcgacggccataaaaagtcgcagcgaagcctgcacctccgagcaccgcgcgcggccctgcccccggcacggcccccaggtgcgctccttctccggctgcttgtagcactggtctcactgtccccgccgtcagccaccggttccttatccgtctcattccccattgtggcttggctgagccggtcgccaggcctcgctgtcctcctttgccttcctctctcctcagcggccgtactttgcgccgtacctcacctggcctgcaggtgagcagcagcgcagcacccctgcccggcgagcttaacttgcccagcccggcccctgccggagtggcaccggcacctctccaagacgccctcttccctgcaggatgaagaaccccatgctggaggtggtgtctttactactggagaagctgctcctcatctccaacttcacgctctttagttcgggcgccgcgggcgaagacaaagggaggaacagtttttatgaaaccagctctttccaccgaggcgacgtgctggaggtgccccggacccacctgacccactatggcatctacctaggagacaaccgtgttgcccacatgatgcccgacatcctgttggccctgacagacgacatggggcgcacgcagaaggtggtctccaacaagcgtctcatcctgggcgttattgtcaaagtggccagcatccgcgtggacacagtggaggacttcgcctacggagctaacatcctggtcaatcacctggacgagtccctccagaaaaaggcactgctcaacgaggaggtggcgcggagggctgaaaagctgctgggctttac

SEQ ID NO: 9 - DNA, 2347 bp, Homo Sapiens
ctgaggcttaagccagggaggtcgagactgcagtgagctctaattgcgccactgcactccagcctgggccacagagcaagaccctgctcaaaaaataacaagaaaggtggaggaaataggtagagatcagaggaaagtcatggccccctcctgaccatcctgagaccctcccaactccaccaattcctggagagtccctcacttgccttatttcacagattgggaaactgagtccaggggcactcagaccacctgaggccccagctggagatgaagagatggattcaaaccaccccttgtggagtatagttttgccccttccagagtggagaccgtgcctcagggcttcccccacccgcaccaaggttggccctctcaggcctcatctttcccacctgcaaaatgggcttttgtgagtatgaaggagggcttggcttgcagtgagcgctgtccacccgctggccagtgtgattagtcattgttgttgttccccagtggcctctgcctggcagctgctggaaaaacatcgagggagggagatacagggctggggaggtgaaaagctggacacagacgcccctagccccttgggatcaggaacagatggaggccgggtgccctgaagtggagcagggaggactgcctggaggagggacacttgagctagaatgtatagaattacagggcatctccggcagaggccacagcagaggcaaaagtccagaggaggtgctttggggaccaccaagatggacacagtgggtctgggtttctgtggggtgatgggctggggcctcgagcgccaggctaaagggcctggctttctccgagggcggtagggagccatggcaggtgtgtgagctggaggggtaccccagacaaaggtgaagtggtatttctccccttattgaagtcacaacctgacactccctctgaagttccccacatcccaccttccccttgccacatcttggcaagcccacctccttccctccgtctctaggcctgccaagaggccctgtgggccccttatggccccacccagctgccccagaagctcgtctgagataagttcccagggctgccccactttcaggtgccccacagactcgggggcgggtgaagcaggaaggatcgagtcacgagggccccagaaaacatgacgggaggaaccacagcacttccccacctcctcagcttccgccttctcagggagagagaccttcagcccgaggaggagggccgagcttccctccatgtggcaagagaccctaacgtcgctgaggatcatctaaagagggtgttgaaggatgcataggagttagccaggagacaacccatttgttaatttaacaaactcataggcatcactcatcaacaagaacaattttcatcattcaatcaggactttctaatgcctctgagggatcatttgaggatgtttaattattatttttatttgagacagggtctcactctgttacccaggctggagtgcagtgacacaatcatagctcactgcagcctcaacctcccagtttcaagctatccttctacctcagcctctgatatagctgagacacaggccaatgccaccatgatgcctggcttttcttttttttttttttttttttacttttgagacagagtcttgctcagtcacccaggctggagtgcagtggtgcgatttcagctcactataacctccgcctcctgagtttaagcaattctcctgcctcagcctcctgagtagctgggattacagacatgcaccaccacacccagctaatttttgtatttgtagtagagatggggtttcaccatgttgtccaggctggtctcaaatgcctgaccttaagtgatctgctggcctcggcctcccaaagggctgggattaccggcgtaagccaccgcccctcgaccatccagctttttttttttttttttcagtttttggtagaaatgtggtctcatgcctgtatcccagcactttgggaaggccgaggtgggcagatcacttgaggtcaggaattcgagactagcctgaccaacatggagaaaccccgtctctactaaaaatacaaaattagccgggcatggtggctcctgtctgtaatcccagctacttgggaggctgaggcaagagaatcacttgaacctggtaagcggggtttgcggtgagccaagatcgtgccattgcactccagcctgggcaacaagagtgaaattctgtctcaaaaaaataaaataaaataaaaatacaaaattagccaggcatggtggcacgcgcctgtaatcctagctactcaggaggctgaggcaggagaatcgcttgaacctggtaggc

SEQ ID NO: 10 - DNA, 6709 bp, Homo Sapiens
actcttaaactcctcaactcacagagggttggagagctggcaccatgagcttccagttcctacgggtgagaaaagaggtgtctgtgtggagggcaggtgcgaccccgggggctagcagagaggagaggctgcgggaggactcgctgcgaagggcgaggggtggcgctgggtgggacgggcgcctggggccgtgcagggtggctcctgggtgctgcccgggctgcctgtcgcccagtactggcgcaggaagacgggtccgcgcagcgtctggcaacagtggcctgctccacgcctggaggcgaccaagttctgagttaaaggcgccgggcttagccgggaagtgtatggcgacccagaacacggagcggagaaggcctcaggggacacgaggctaccgccttagtcctcgggcctgcgctccgagcggttagggtgcgtacggatgggctccgggatgttagtggagaggtgacaggagtctaccatcccacggccaagcgtgtgaggcctccggcgggcgggggtcccccccggggcagggcagggggagagtcaggcatgtctctaacgggctccctagtagaaccgctaggaaagtggccttcaaccctaggcacctttgtggctttcaggtagttgggcgactaaaaattcacttttgcctgctgtgaaatgggacaggtggttgtcaggttagagactgtgcccacgaagtctcgtttggcgggccgggactgacgtggacccgggccctcctcggaagcttgggaacctgtgagcccctcagctcctcgcctcactttgcctgtttgaaaaaaggagttgtttgagaggaagagttaaggctcaaaaggttctaaacgaagagcatgcggcctgacgcggagcgcaaagaagcgagcagtgaactgaatctggtgggactgagaccagaggcgtctgtatgcggcggccgcttcgcgccctattaaagcaatctgttatttacgataatcatttttgtaattattttggagtggctgtgacttgatgtctgtggtgccccagggcatgcccttactggacatagatacttcagggtgccctttgacgccagtgtcggtccagtgggtgccagtgccgcgaagggagggtggcgggcgtgaatgccccctcctcctgggtttgccgcaggccccggcctttccaccttgcttgatcctggcgggtctgccacttactgaggtccctaccggcgctcacgttgtcccgagaggcgggacaaacgtccggcgcgtggcgcggagtctgcgaaagcgctcgggggcctccatcttctgctcgggagtcccctccctggggcgggaagaggagtcgcagatctgcccgaatcttgctctacccgcctggccgccttcttccgtctggggtgggggcaggggtggcggatgactcaggcctggggccgggagccctgtttccaaaggcaccacctcgcgcctctttggaagtggcgcgctgttggggcgctcccgctgttgcagaggcctggtttgcggtttcataggggcgtgggtccagggcttccagggagtaagtgagtttaggctccctagggggcggtagaggggaacccccgacaaccttccatcctcttctccaggcggctgcgaggcctccggggttccagaggggtccccttctgccggtgccggctgtcttgagcgcggccacgcagtccgcgtcttcacgtgggcaaggggcggggacgttggagggaggctgtcttggatgctggagccttcggttcccggctctgctgagcagaaaagttgaagtcaaggaagggttgaggcttcctcacaagggcgcgcgcgtgcctgggtgccggcccagaagccgagaatgtgcgtattggggaagggtctcccgtgccgagaagacagaggatttgttctagctgccttccgtacagagggcgcggaggttgcgctccagttcgaacgcttacccattggaaagagggcagcgccggggtccagggaagctccttgggaatgaatggcctttgccaagcggttccggatcctctgggtcctttgggcccacggcacggtgctgcgcgagccctcagtgcccatcggctcccttcgcctcctgcgtagacgctcccaggcggggaggcatatcggttcctccgggcagctttggctagtgttgctgtgggaaaggagagccagggcctgggatgggggatgagcaccttcttgcccattccgggccccagcgtgcaggaggtaaacttgccagcacagacaagacagcttgttcaagctgcacctcaggccgggtcagagaataaaaccgagggctagaaggcccagaatgtcggacagcccagcggcacccgtcagggagtcccaggcgcccgaaagaggcgccgcacctctggcgagtctaggacccatcttcctggacctgtgctctggagtgcctgcgggcctgggtctaatttctgcttctggcaggtgtccccctcccccgccgctaataccaggagcgctgcttctgcggtaacttattttacccccagaagcctgttttgggaccgaagtgtcagggtcctgtgtgtctttttatgcactgttctccttagtgcaaagccctgcagatatgcttggccgaaaagtctcagtggtttcaacttccagattttgttcccgcgtccggtcggaaaatcacctgggatttggctgctgtctaaggccgggggaaagtttcccttggaggacgcctattattattattttcttttaggcccacctgggtctaaataaatgctaaagttcaaacgaacccgagaaggaacagcgaggcagtggatgccgccattccgtggatgggagagtcatgtctactgcaggtgcggacaccgtactgataggcattgattattgcaaaatcgtattcagtatcaaatagaaatagtcttgtcctctaatccccacagaatgtttaaatccagcccagggagccagttggggcgtcccaacaaatacgccctcgagaattagcgatgttccccttacaatgaaagtcaattgctgcataataactgggccaaagaatttcgttagtttaaattttaaaaattagtattgcactttgctttcaagtttgggtggcaagtaccgaaggggagagggaagcagcgtttgtgtggaaggaagtttcgttttctgtctaaacatgtgggacctgggtgtctacctctccagtcgagagctctctgcaggctctctcccaacttcctgcacctcctcaccctcaccttacccgtggcgctcgggttttattcctgcccggcgcttctttcccagggcgagtagaggcttctgagtgaccggcccgccagaggcagctgcagagccggcgttccgcagggcagggcagggccgggccgctgggctggtccagtgcgcgcgggttccccctggcctcagccagccgcgggagatgccacttcgggcgacagcggcgagacgccgctgtccgcaactcctgggcgggtaggaccgtctgctgcctctgcggcccttggggcagactccccaggagtcccttcctctctcctcccgcccgggggccgggaccgcgctgtgcccacggagggaactgggcgtctctggcgcactggggctccagctgcatgatcccagctcagaccttaagcctcagtggggtgtaggtgggatgggatgtgtttttaggagatgaggagaccccggttgttgagtcgctccccaaatgcgcagtttcttaactccaggtgacatccgtcttttggaggaacgagtgaaggccgtttaggcgaaagaggggtgggtttcagtatttggatcccttcccccagctctgccaatctcaggtgtgtttacggtggaggtgacagaaggaaggcgcgtcgggggacccaggcctcgcaggtcttcggctgtcaacgaggcaccgcccactgactccgcgcttcgtccctcacagcgtggggctcggcgctgcgccaggcccgggtgcggggcggagctaggctgggactggctgggggccgccccgcccggcgcctgggcctccgcgccggcccccggggaggagttatgataatttccttctcattaaggcgctcgggtcccccggctatcgccaggacacactgttcgggcgcggctttccccgtccgcggagcggtcttgacactcgcggcggcagcatctacgctcgcagagccgccgatgcgtgtccagtgacccggacagcaaggcccgcgcgcggcgggggcggcggcagacgcctggtcaccgtgaccccgattttggatttaccgcttgggggctggggggatcctggatttaactggcgactgttttgggggacgccggacgccatgttgtggaaaataaccgataatgtcaagtacgaagaggactgcgaggtgagctggggctccggggtgcagccccgccccgccgaggacagtccgggaggcaggggccactggaccgaggtcggggacgagggcataggagccctggcctctcggtgggacgggatccacttctccggacaccccttagtccatttctgcggggcccctttcctgtatagggccttttcctaaatagcctcccctcgggaacgaggcctggaaagagaatggcaaatcccacccacacagcttaccgggcgctttcctaagcggcaaacagccctgcttcccgttttctcggaaaagtgccccgtctgcaaccctcagacgtggcttttacgcacgaagtctctgtccaaaggggtcagatgaggctacctgctagcgacaccttggcggacactcctccaaggccggcttgtcacctgccccgctacctcctcggggaagcacgaaaacaaccgaagtttggctttcaaaagaagtgggggctggggagtggtggtgggggtgcccgaggccagatggggccgtaagagctcgcgagtgctccagcctgtcggacaggttgagctagagtttcggagagtgggagggaagaaggaggcggcgagcgggaagaggaagaagacgcaggcagcgctaggcgagctcaggggcgccgggagcgcggagctcgggctacggactcgcgggagttcactgcgcctccgggccctggagggctgcccctgcccgcaggcccgggcgcttccgccaggaggcgacagcgccatgttcctccaggttcccggcgccccgagacccctgggcagatggggacgcatcctttagaaactgagtcgggccgcccaggggcgagggaacgtgcgcgggcaaggctgcccaatttccagggttcttcatgccccctctgcgccccgacgtgcgagaacactgcccttggcagtgcagggcgcccccacttattactcccctcggctgggcccggccagcagggagggccgccctgtgcgcgcgctccctcttcacttcccagggcggcgcagggtggcgggccctgctttccgagcgccgcccgctcggaggtctttgtcccgagggcgtggaagggagggtcccgggggcgggggaggtgcgcatttcccgcgccgcgcactctatccgcgcctgccgcgctgccacctccagcagtccctgcgtcatgggcgggctccacgagatagctctgcaccgggcgtccggctccttcgccccgggctctggctccttcgccccgggctccggccacggacttttctggcccaagacccagggttcggacttggcgcctccaagcgcctcgggcttgggagcagcgcctagaccttcgccgccgggctttgagaactcgttcccccaggtctttcaccagactctcctccctccccgcactctttgcttacaacgaaatcctcggggcgcattgcccccgggtaccttccgaccctgggcaagccccgccgggcggggtgcggttggtcccccggggccctctgcgtagcccggcgatgccggccagttcgcagtagcggggtttcgcactaacggggtctcctgtttttttttttccctccaggatcgccacgacgggagcagcaatgggaatccgcgggtcccccacctctcctccgccgggcagcacctctacagccccgcgccacccctctcccacactggagtcgccgaatatcagccgccaccctactttccccctccctaccagcagctggcctactcccagtcggccgacccctactcgcatctgggggaagcgtacgccgccgccatcaaccccctgcaccagccggcgcccacaggcagccagcagcaggcctggcccggccgccagagccaggagggagcggggctgccctcgcaccacgggcgcccggccggcctactgccccacctctccgggctggaggcgggcgcggtgagcgcccgcagggatgcctaccgccgctccgacctgctgctgccccacgcacacgccctggatgccgcgggcctggccgagaacctggggctccacgacatgcctcaccagatggacgaggtgcaggtgagcggcgctgcggctcctgaccggacctgttcaccctacggccttctgcccccaccccgcactcctctaggctcccccgaacttaagggaattttgtcctctctcccccagaatgtcgacgaccagcacctgttgctgca

SEQ ID NO: 11 - DNA, 2296 bp, Homo Sapiens
gtcactgcaccctgccaacatttttcaaaagtaaaaaataaattaaaaaaaaagtctttagtggattgctgagtcccctctgacaggaggtaccaaatgtgcttttcctgaggacaggggaagagttcactattcagccatacctttgcatattttacaaaattcacttctaccaaggatgcctctccacaaaatgaggagtagcacaaagaacacctaagaaaccaggcctgacccagggcctctgatgctggggcaggttccccgcgtgctaatatcccaggggaccctgttgcagttctctgaataccggctgtgagctttccaacttcagctgagtcccagcatcctcctcacaccacttatcctccttgcctgtccctggcgcgtttagacaactggaatctttgctgacattttaaatgggctggctacttctccagcgtggaggcacctagcacaaggtgtgatagatcagtatttgttgatgagtaacaaagttattctggcaaattggacttttcccctgaaacgttttggcttttacatttttaatgatgggtcaagaaacagcccccaagaagaaggggcggagatagggggtaggaccctgcctgaagcttccaagctgactctgtttgcagtcacttaattcactagggagggctggatctgcctccctgtggtggactctccgcatctccagaaagtgcaggggtggagaattaactcagcccccctcctccccataagagccccgccaggtcagcctgcatgaggagggcacgtgcacacctccaaaaggactggtgcagccacttccctaagctcacagtcccagtgtgagctcagggcccagactcggggcctctggtgtttcaggcgtgagccaagtcccctgagcaagaggcctcatgataaatcagttggagcctgggggccatgaaagcattggttatggcagaaactaccagctcgtcaccgtttatgctgctttgcttaaaaatgacaccgcgtaagggattttgccaattcccaacctcgggagatcacccaccacctggctgtggtccgccgctgaacaggaaagcactccgagatgccaagagactaaaaggctcgtaactgttgtttagaaatgaaaatggccctaaattataaccagagatggaagcgcgtctcaggggagggcggggcgctgtgtaatcgagcctcccatgcgcaaggcggatacaaacggtttatggatgtgggcgaaggttctcagagcaaagaatgtccatttccatcagattaaaatacagtttgggaaaacaattacctgcctgagatcctgggaaagtaaaacttcctggtttctttgccaggaagaacgattgtaaaacaagggctgagaatctcccaaacaagattttagaattttatccaaacagctgcagttcacctttgaggagccccagactcacttgggtctgatggatgttgcaacaccaagtttgaggtctccccagcctggtgccaagagtgggccccaggggacaaacagagaacagttgctctcttaatcggagtagaaaacaaaactccctccccttcccacccccaacctccctgctttgttgtgaaattgtcactgcgcctttgaggagtgattaaaatcccagccatgaccaatttaaagggcaggttcccaggcagggaagggaaaggggttcaaggcaaaaaaaaaaaaaaaaagtcagttgaagtgagtttatggaggatttggggatcacaaaagtcatgggacttgagtcaattaaaattaatggaaaagcaccaacatgcaatttaaaaaataataataaaataaagcagtaaggatatttctggcttgctctctgcttccattcttgagcctgcttgggaatcttggagcagacttcctgaagcacagcatgagtgcccaatggctgttttaacctattttcctgcccttcacacacaaagattctgcaatggagagtgggaatgaatggtccacccacccctgaacatttcctgtgagttgggaatgcgctcagtaaggctgctggagtggagggaaaagaaaaggtgtctgagttctctagacatgggcagaaaaggagagaatttgagacaggctgagagaaagctgctccggttggcagcattgccagattctcagacacaccgtacattccagcccccgaaaaggccatcctgagtccctctagggcccctggggctctcatctcatcccaaatatttggaactgtctgtgcctgctataata

SEQ ID NO: 12 - DNA, 4247 bp, Homo Sapiens
ctccaaaaaaactaaaacacaaaacaacaataattactaaaaatcctacctccgctcctctaaataaaaaacctattccaaaaactccaatctaaaaacctaaaaacgaaaaacgcgcactacaattcccaaaaatccccgaactcaaaaacgatccccgccccccgccttctccgcgcgacgaaaccgaacttaccaataaaaacccgaaataaaacgaacaaaaacgaaacgaaacgaaactacgaaaaaataaccgacgaaccgcgccgcgaaccaatatctcaaaaaacgcgaaatccgaacaaccgcgcgctaaaaatctcgaaacgaacgccgcgaaacctctccgaaccataaataaacgactctacgacgcgacccgaacaaaaactcgacgaccctacaaaaaaattcaaaataccgacgccgaatcccctccaaccctcgtaacaatcgatacgctatataaaacgaaaaaaaacccgaaataaatttcgaaacgcgaaccaaaaaaaacgaacccgacccgcgacttcaacgctccccgaccgacgcgaaaaaaataaaactaaacgtccgcgcgaacttcgaaaaaaaaaaaaacaaaaaattttaacgaccaaaaacttcccgaacgtttatctcgaaactcttttcgccgtctcttacctaaaatataccgaacccgatacgactctatcgtcccacttcctactacgatttccacctcgaactaaactcaactaatttattataacaactatcgacaaccgcccctccgccccgtaacatcccgcaaatttcaaaaccgcgacgccgccgaacacaaactccgaatccaaaacgcgcgaccctttcctctacgaccgccgtttcctaaaaaaaactacgcgaatataaaaaacttactcaatacgctttataaaatccactattcctctttcgaccgcgaactacgccgataatccgaaaaacccgacttctcgccccctaccccttccttctcttcccttttctcttttcctctcctatctctccgcccacccgccgcaaccccacaaaaaaaaaatcgcttccctaattactctcctctcctatcccttatatatccccttatcttccctcgatctacaaaaaaaacgaaataacgactaaaaaacgtcaaaaaaaaaaaacaaaaacgtaaactacgaacttacaaacgatacccgacttcgcgctcgacgaaaactacgaaccaacccgaacccgcgctccgtccctccgcgatatctaaaaatcgcccgaactaaaatcgcgtcaccctccgcccaacgccgacgtaataaaacttacgcgatacaaaacccccgaaaacccaaaaaatcccaaaacgctacgaatccaatatccctttatttacaaaatcttaaaccaataaaaaatactccgcgaaccccaaaaaaaaacaacaaatacctcttaccccacccgaactcctctaataaaaacccacacgcacgataacgtcactacgcctacaaacaacgctaaaacacaaaaaaaataaaaaatcgaaactcgaaaacttcaccccgcaacaaaactcaaaacccaatccaaaccttaaaaacccgcctaaaacctaaaacttaatataacaaaaataaaaaaaacctccgataatctacttctacaattaaaaaacgtcaactaacacctctaaacctctaccccgtaaataaaataaaaacacacgaaaccatctaaaaaactctcactatccgtcaccaccaaatataacccaaactccgtaaaaaaaaacaatcccatcctaaaactaaaacttttaaaacatcccaaaacccgataaaaaaaacaaaaaaaataaaacttaaaaattaataacctcacattcaatatcccccgcacctccttccctttctataccctctaataactcttataacctcaactacccccaaaccctatctctctcgccctcccccaaactaaaatactaaaattaaactataacttaaactacacctataccctattaaaaaataaaaatcccaaacccatcgcgtttcttctcactactaactccaactcaacacttaacaaacccccctccccaaactactaaaacaaactcgcgtaaactcgacctaaccgccgctcccgaactaccgaataaaccgaccgtttcgccgcttcaaaaactatctttattttactccaactcaaacttaaaaaaacttaaaccaacaacctcaaccgaaaaaacgaaacgacgtctactaattattattaaaactactattaccattattataataattaacgcaatattcccaatcgataacttttcataaaaaaaaatatcacttccttcccatcacacccaaaataaataaaacgaacaacaaaaaaataaaaaaaaaaaaaaaaaaaaaaatatatacctccaacaaacccttaaacttaaaaactatataaccttatactaatcactacccctctctaaacaacaaaaatctataaatccattacgctcatcctacacccaaaaaactaatatttccgaaacacctactaaacaacgaaataccttaaaaaaaaaacaaaacaaacaaacctctaatcttctcactaaacctaactataatttataaaaaaaacctcctttctcttctcacttttttctactaaaaacattaaacacattaaatctaacacgcccatcttataaataaaaaaaaaaaaatacaaaaccaataaccaacttaataaaaaatacaaccatacaatactaaaaccccttaccccatctatcctcttaacccactttcatctacttccaacttaatatctaacaaaacaaaaacccactaacttccccgcatccacccactacctaaccccataactaccttctaatcctaactaaaccccgtaaaacatcttaaatttatcttcaataactctcaaccaccgcccgactaccttcaccttcctacctttacatacctacctttacttcgccaaattaattaaaccctaaccaaaactaaccccctactctctcaaataacaaataacaattttttaaataaaatctcaataaatatcaacaaatctttcctccttcctcaaaattataaaaataacaccccttattcaaaaataataaatcctctaaaccctccccgacccaaaccaaaaaaattaattcataaaatataaaaaccataccccttcccgaccctccccctctccccgctactacccaactctctaaccaaccccctcccatccctaaacctaaataccttaacaatcaacacaaacctactcttattaacaaaataacaaaaacgatatactaaaaaactacacatctacttaaaaaaaaaaaacaaatttacatcctctaaacacaaataaaaaacttaaaatctccctactcccattaaaaaaaaaaaaatctctaactctcaaaaatcaacgtctctcaaaaatcaaactaccctaattctaaatcccaactctaccataaataaactctataaccccaaacaaattactaaacctctctaaacctcaaacattatatctattatatctaaataactaaaaaaattcaacaatacaatattatataaaatacctaacccacaccaaccaaaacactaatttaaatcgataaaacatataacttaaaaacaaataaacctataaaaacatcctctactaaaaacaataacaaactaacatcttcaatactaaaattttaaaatctaaaaattaaacttaactcaaacaaaaactataaaattaaaaaaaaatcaaactcataacacaaaaaaaacctcaaacaatcctcctacccaacaccctaccgcaccccctctctacttaataaaaaactaaatcactaaaaacccaaactcatcttctaacgcaaccacctaacctacctcgaccctcttcccaacaataaaataaaaaaatcgcaaaaaaacttttataaaataaactactattatcaaaatttttctaacaccattttctaactacacaaaactcaaaaaacaaactaaaaataaacctccccaaaaaaacacaaaaactttttaaaaaaaaacttctaaaaactacaaaaaaaaacctaaattataaaaacacataatcctaaaaaaaaaaatacaatactataaaaatattatttctcctcaaaataatttctaaatttaaataca

SEQ ID NO: 13 - DNA, 3905 bp, Artificial Sequence
  chemically treated genomic DNA (Homo sapiens)
tttaaaaaagtagattcgaagatgtttaaagtaataatggtgttgttagaatggtgtttttttttttttttaggggatgattttgaaggatattataataatagatgtgtaaattttgaaatatatggttaaaatgaggtttattattttttagttattatttagatattttttagttatttgtttatgatagtttataaatgagaaagaagtttatttaaaatatttttatgaggattttaaggtaaataataggaatcgattatttattaatttggtttggtttcggtttattgaagaaagtttttttttgagtgtatttaaagtttttatggtttagttttgtttaatttgagtagtattttatttgttttttttttagacgtttcgatgttttgtattagatttaagagagagttaagttttttaataggttatgtacgtggttattaatatttagtatacgttatttttggttagtttttttttttttttttaagaattaaatattttttggtttgagttttttttttttatgttattataaagttgagttatttattattagggtttatatatgagtagttaaaatatacgggtttttatatttaggttaaggggtttttagtaggagaatatgaataattaggagtgaggttatgagatagaggaagaaaagtttataggaatgggaagatagttttttagatgagaggtgtgcggagtgattgttgtgaggaattgtttaataggaaagttagttaatttgaggacgtttttaggggaggaaaagggaaatttatatggttttttgttaatttttaaaaataaggtagatttttatttatttagggtgtttgttcgttatgaatataggaagattaaggaatgagtatggattgtttttattttatgttttcggataagaagaataataaaaaagtattgggtagttggaataattgtagaggttttaataatgatggagattttttggtgtatcgtggtataggggttttttttaaagggatttaattaattttaataggtattattttttgtgatttaagatgttttttttaggagtgtttgtattttttaatgtttagagaagttcgtattattgattcgggaatattgagttttttagtttttgtaaaattatttttaggtttatttttaagtatattttttatttcggggggttaaattttttggtttttagtgaatatcgtggttatatttgtggttatttattgattttttatttgtttagtttatttgataataggtaaatggggaaagaggttttaatattttttaaaaggggaagattgataattagttatttatcgtatagaattaggttaggttaattttttttaagaagaaaagtaatttggatattgtattttggggtttttttttattttggtattataggttttatgaggatgtagtttttttgtatttttttttttttttttaaattgttatttatttatttattttaattaggttaaagtattatatattgtagaagagaaagtaattttagttttttttaaacggtgttatttttatgatagttcgtaaattttggttttttatgggtttaggatttgcgcgtattcgttcggggatttgttggtggatttattttttatggcggagtagtaaggggattttttagaaaaagtaatgggcgaagtaattgaaagagcgacgtagaaagtaatagttagaaacggcggggacgcgagcggtttagataggaagggaggcggtggcgtagttttggtgcgtagcgcgtcgtagcgacggaatttttgtaaaagttgtttgttcgcgcgttattagcggcgcgtaggtttgtggttttttcgttttcgtaattttgttttaattgtcggtttatttttcgataaataggatgtttttatttgaggttgttagtattttaggttttttgaaagaaaagaagtagagcggttttattttagaggtaaggacggggtttgtgttaagaggttttttagagaagtgaaaattttgtaggtgtagtcgttgggagagtattaagaagggtagggtggaggggtagggggcgaagggagggggtgaagttcgtattttatttttatatgaaattgattttattattttatttttgtaagcgtttagaggtagagaggttaatatttcggggatagtttggaggcgggagatttaggtagggttttttaaatttttatgtgtatgaaaattaggttaattacggggtttttgagtaaatggggacgatgatttagtaggtttgggttgaggttttagattttgtatttttaataagtttttaggtggtagtgatgttgttagtttaaagattatattgtgaatagtaaggcgtcgtcgggatagtttgttttagagtaaaatttaatagatgtgtaaatatttaaattaagttgtatttatttttgaggttttggtttaattggagttattttgttaatggaaaatggaaaatgaaatttttttaggttttaaagggaaggaaagtttgaaatggttaaggtatttaaaaaattttagttgggagtggttttggggattcgggagagttgaagttaggttttgagttaagagatgggggaggaagggtgggatgtggtaaataaatataaatatatatatataaattttagtttaattataggtttttttttattaatgaaatatttgtattttgtaggtagaatttatacgtgtttatattttttagaagttgaatggttttgtgtaatggtatagaatttggagtttatatttgaatattttagatttaatgttattttagattggttttaggattttgtggtttatatttaaaaatgtatgtttttgagttatgtttaattagtagtagtatttgagaattgagagattagattaagaaatttatggtatatgaataaaatttttagatagtagttagaatatagaggtttttttagaggtagtgttagttgttagttgtaaaaataggttttgtttagttttgtttaggtttgaagttttttgaagattttatttagattttattaaaattagttaaagattttttgttatagaaaggtttttaaagtatggttgggattatagggttattaagatgtagatttttgggtttttttgttttatttattatggttttttagggtgggtgtcgggaatttgtattttaataaacgttttgaggatttttatgtattgttaagtttaggagtttttggtttgtaggtttaagtttaatttttttattgtagtatttaaagatttggttttaattttgttgtttataggcgagttttagtgatttttttattgttttttgagtatttttggagttatttggttgttttatttatttttttttttttgtttttttttagttttggaataaaatgatttttattttttttttcgaattttttttagattatggttttttatttagtaagtagttatttttttggtttgttattgttgtggtattaatgataggttattcgatttttattttgttgattgaatattttttatgtttaggttttgtttttttgattagatagtaagttttttgaagttattttatgttatataatttttatgtttaagattattttttaacgtagtgttatgtttatatggattatttagtaaatttatcgatggtttatttattattaatatgttttatagagtgttattaagtagggatattttttatgggtttaggattagaagaagttgggaagagaaatggggtagtggtgagagtgttatgagaatttggttatatagttattaaagatatagaggaagtgggaaaaagggagtgt

SEQ ID NO: 14 - DNA, 3905 bp, Artificial Sequence
  chemically treated genomic DNA (Homo sapiens)
atatttttttttttttattttttttgtgtttttgatgattgtataattagatttttatgatatttttattattattttatttttttttttagttttttttgattttagatttatagagagtgtttttgtttaataatattttgtaaaatatgttggtgatagataagttatcggtaaatttattgaatgatttatgtggatatgatattgcgttagaaagtagttttgaatataaagattatatagtatgaaatggttttagagaatttattgtttggttagggaggtaaagtttaagtatgagaaatatttagttaataaaatgagaatcgagtggtttattattaatattatagtagtggtagattaggaaagtaattgtttgttgagtgggaagttatgatttgaagagagttcggagaggaagatggaagttattttattttagggttggggaaagatagaggagaagaaatgaatgaggtagttaggtggttttaggagtgtttagagggtagtgaggaagttattgaggttcgtttgtgaatagtaaaattgaagttaggtttttgaatgttgtagtgagaaggttgaatttaaatttgtagattagggatttttaaatttggtagtatataagaatttttaaagcgtttgttaaaatgtaggttttcggtatttattttgagaaattatgatgagtgaggtagagaggtttaagaatttgtattttaatagttttgtagttttagttatattttaagaatttttttgtaataggaagtttttgattggttttgatgaagtttaaatgaaatttttaggaaattttaggtttaagtaaaattgagtagaatttatttttatagttgataattggtattgtttttggagggatttttatgttttagttgttgtttggagattttatttatatattatggattttttagtttagttttttagtttttagatattattattaattaaatatgatttagaaatatgtatttttaaatgtaggttataagattttaaagttagtttgagataatattggatttagaatatttaaatatgggttttaaattttgtattattatataaaattatttaatttttgaaaaatgtggatacgtgtgagttttatttgtaagatgtaaatgttttattgataggaaagaatttgtggttgggttggggtttgtgtgtgtgtgtttatatttatttgttatattttatttttttttttttattttttggtttagaatttaattttaattttttcgaatttttaaggttatttttaattaggattttttaaatattttaattattttaaattttttttttttttggaatttaaaggaattttattttttattttttattagtaaggtggttttagttaaattagggttttaggaataaatatagtttggtttaaatatttgtatatttattaggttttattttaaagtagattgtttcgacgacgttttgttatttatagtgtggtttttggattggtagtattattattatttgggaatttgttagaagtgtagaatttgaggttttagtttagatttgttgaattatcgtttttatttgtttaagagtttcgtgattggtttgatttttatgtatataaaagtttaaggagttttgtttaaatttttcgtttttaagttgttttcgaaatgttggtttttttgtttttggacgtttgtagagatggggtagtggaattagttttatgtgggggtagggtgcgggttttatttttttttttcgttttttgtttttttattttgttttttttgatgtttttttagcggttgtatttgtagagtttttatttttttgggaagttttttgatatagatttcgtttttgtttttagggtggggtcgttttatttttttttttttaaagagtttgggatgttgatagttttagatggaggtattttgtttgtcgaaaaataaatcggtagttaaagtagggttgcgagagcgagaaaattataggtttgcgcgtcgttgataacgcgcgggtaggtagtttttgtagaagtttcgtcgttgcggcgcgttgcgtattagagttgcgttatcgtttttttttttgtttgggtcgttcgcgttttcgtcgtttttggttgttgttttttgcgtcgtttttttagttatttcgtttattgttttttttaaaggatttttttgttgtttcgttatgagggatggatttattaataagttttcgggcggatgcgcgtagattttggatttataggaggttaaaatttacgagttgttatgaaaatgatatcgtttaagagaagttgaagttgtttttttttttgtagtatgtaatgttttgatttggttaaaataaataaataaataataatttaaaaagaaagaaagaaatatagaaagattatatttttatgaggtttgtaatgttaaaatgaaaagggattttaaagtgtaatatttagattgtttttttttttggagagagttgatttggtttgattttatgcggtgaataattaattattaattttttttttttgaggggtattaaagtttttttttttatttgtttgttattagataagttaggtagatgagaagttagtgggtaattataggtataattacgatatttattggaaattaaaagatttgatttttcgaggtaaagaatgtatttgaaaataaatttgaaaatagttttataggagttgaaaaatttagtgttttcgaattagtaatacgaatttttttgagtattaaaaagtataagtatttttaaaaaggatattttgagttatagaagatgatgtttgttggggttgattgagtttttttggaagagatttttgtgttacggtgtattagaaagtttttattattgttggggtttttgtagttgttttagttatttagtgtttttttattattttttttgttcgaaaatatagagtagaaatagtttatatttattttttaatttttttgtgtttataacgagtaagtattttagatgagtaagaatttattttatttttaagaattagtagagaattatatgagttttttttttttttttttagaaacgtttttaggttggttaatttttttattgagtaattttttatagtaattatttcgtatattttttatttgagaggttgtttttttatttttatgagtttttttttttttgttttatggttttatttttaattatttatgtttttttgttgaaggttttttgatttaaatatagagattcgtatattttggttatttatgtatagattttaataatgaataatttaattttatggtgatataaaggaggaaaatttaggttaaagaatgtttaatttttagggaagaaggagagagttggttagggatagcgtgtgttgggtgttaatagttacgtgtatagtttgttggggaatttggtttttttttgaatttggtgtagggtatcggaacgtttgggggaggagtagataggatgttgtttaggttgaatagggttggattatgagagttttgaatgtatttaagaaggaattttttttagtgggtcggggttaggttagattgatgaatgatcgatttttattatttattttgaggtttttatggagatattttaaatggattttttttttatttataaattgttataaataaatgattaaaagatgtttaagtggtgattagaaaataataaattttattttagttatatattttagaatttatatatttgttattgtagtgttttttaaagttattttttgggagggagagggagtattattttaatagtattattattattttaaatattttcggatttgtttttttgaa

SEQ ID NO: 15 - DNA, 5338 bp, Artificial Sequence
  chemically treated genomic DNA (Homo sapiens)
ggtaattttttttgttattattttttgtataaaatatgtaagatgtttttattttattagtattgaaattaaagattaaaagagagaaaggtgttggatcgaaaaggaggcggcgtaacggttattttttttagtatttcggttttgtttttttcggggaaggcggttatatttttattcgttttgtttttgaacgtagtaaataattttataaataattatcgttgtttacgttttttattcgttttttcggttttattagattttcgttttttcgtatttttcgggtagggtttttaataagtttaggttgaaagaacgtttgttattttttttattttcgttgaaagaaaaggaagaaaaatagtagtagcgagaaattttcggggcgatttttttttcgtttttaagtattagcgtatagtatttttttttgtttttgttgtggtttttcgttgtttcgggttacgtcgtttagttaagtaattcggatttgagagtgtatagttaggattagtttagggggcgaggggttggtttttgggaaattaagcgtttaggatagaggtggaaagtgggtttcgggagttagaaaagagagagaagggtagacggttgggtggtaaatataaaaatagaaataatttagggggatgttcgttaggtttttgcgtttgtttttttttttttaattcggagtaggtttttttcggtttttcgcgtttcggggcgttttttggcggtagcggtagtagcgggtaacgcgcggagggtttagggggcgtataggggattttcgggtatatttagagaggcgggcgcggttttttggcggtggcgacgtagttatttggtgagcggagtttcgtttttttggttcggcgggtttacggtcgttttattaagtatcgcggtcgagtagggtaggaagtcgttttcggaacgcggcgtcgtcgcgttgtagtcgaagttcgagtttttttcggtttcggcgttttcgtcgtcgtcgttattattattatcgtcgtcgttatcgttatttcgggaatttagggttgcggtagttgttgtcgcggttgtcgtcgtcgattgattgttgtggtaattgaggtacgagtagggtgtagagtcgtcgttggggggcgcgtcggtcgtcgtcgtcgaggaggtcgtagtcgttgcggttgtcgcggttgtcgcggtagaggtcgcgttgttgagtttcgcggcggtcgcgggagtttggtagagattagggtggcggaagttatatagtagtttcggtcgagagtaggggtgcgagagggcgcggaaggtgtttagtggtcggatggaagtagcgaagggcgacgaagtcgcggtcgtcgcgtttgaggttgtagtcgcggtcgtcgtcgtcgtgacgtttacgtgcgggtagtagtgtagcggtacgtgcgagtggaaggggtagggtaggttttcggtggcggtcgcgtgcgttattatgtaggtgtagaagttggggtcggttgggtgcggttaggatatggttaggcgttgtcgtttgttttttatgcgtcggttttggaattatatttgcggggagagacgcgtcgtagtttgggttagggagcgtttcgtgtttttagtttttgttttaggatttttgtttttttcggatttttgaatggtttggtttattttttttcgattaagtttaatttcgagtattttgtggttttttagttgggaaagtgtggacggtagtgtgtggatcgtcgtgggtatatcgtttttaacgaagagggttttttttttcgcgttcggttgttgttgttttttaggtttttatttttttattttttgttgtatttttttgttttaatttaattttttttttttttttcgttatttattagtgtcggtttcgttgagtattcgttttttaattttaggatttgtacggggattttgggtagtttttgaagagaggttgtcgtttagtttttttgagaggtcgtcgcgcgaagttttgagtttttcgaattgtaaggatttgtttttaggggtacgggttcgattttgatattgaagggatgattttgttggaatcgtttgttttaaatgagtgggtagagtaatgtttttataaacggggaaggggacgtttttattttttttaatattatttaataaagatattattcgttataattttaaattaaagaaagttcgattaaattagagggagatttttatattttttttttatttcgtggagatttttttttttttttgtagtgtcgaacgttttatgaagggtttattaaatcgtttaatttttcggttattttttttagacgtataataaaattaataatttaaagttatatataaataaggataatttcgttgtattttttttcgtaggaggttgtttttttttcgttgtttaagaggaaaatgtttaggaaattattgttttaaattaatcgattttaaagatatagtattttttttttcgtgtaacgatttatgcggaaaataaatttttaagtttaagagtaaatgaaaagttttatttttggtttttgtttgaggaataaagattaattgggtttgtcgtttaggggaaagtggggtcgtgggtatgggcgagggggtatttggttaggcgttgggtataatggagtaggggcgagtgtttttagtattggagttattattcgggggtttttttagattcgttaggtcggataatcgttcggattcggtggtcgggaaataaataagttaatttttttggtgattatttttcgcggatttttagatttttagttaaatttagttatttagaaaggggaaaggggaaaaagaaataattaatttagatgttttcggggaggttagagtaggtatgtattggaattgatattttgatggtggtttcgggtaggttgagtgtcgcggttagttcgtatcggcggggtcgcgatatatagttttttcggtagaattttttttttaggcgcgcgatttgttcgcgggtgaacgtcgtacggtagcgtcgtatttgattcgcgttagagtcggagttatttagcgtcgcgttttcgtcgttgttttcgttgtttttatgtaggttttcgaggtttgagttcgacgtcgacgtcgtggtgtcggtagtcgagtcgttttttgcgtattttggtaaataaacgattaatagcgtatgagtggttgtaggattaatagttcggcgttggcgttgcgcgcggatcggggaagtttcgttaggaaggagagtcgttgtcggaattgatggggtttgttatgtttataaattgttgtcgttaatggaattaataaagtttggggagttttttataagtaaataatagaaacggaattaggagattttttttttaataattagaaatttttaattaaggaggaaaagtggtcgagggaaaatgtttatttttgggcgtagtttgggaagttttgggttttttatggtttggagatcgtagggtagttttttatacggtttttaatttttatttgagttttcggggttttaaatattttaagagttttaatatagtagtagtttaaatttaagttaatagggggtgaaatatattttttaattttttttttcgttgatttaaatagagacgtcggcgaggtttttttcgatttatttagaagaatgttttttttagttttgagggtataggggtaggggagtttagagtagttgtttagggtattttttttaaaagtaattcggttgttgattaggggtttatcggttcgttcgggtttttagatacgagcgtagaaatattttttcggatttaggagcgagggcgggtgggtttggtgttttaggtttcgtaggtttgagtttggcgggaaagtttaaggagtagaattggaaggtacggttttagatatgcgtttcgttttcgttcgtgttagttcggtgtagtttgtttgtggagggtttgagaggggaaaaggtatcgggaaaggttggcgggggtcgcggaggagtaaagaggatgggattggagagcgcggtgcggtcggcgcggttatttttgttattgttttttttaagttgagcggcgtcgaggttttcgggggagcgaagcgcggagtagtttatttttacgtcgttgtttatgtcggttttagcggtcgtttttgaataatggttcggttttttgcggttttcggcggcggaggagatttcggaggagacggtgttttcgttgttcgtgtgttgtaggttgaataaagtgtttatttcgaatttgtttttggcggggagtttttttagagcgttgtgtaggggggtagacggtaggcgcgggtttaggcgagtcgggtgttgcgaattttttagggtttcgagtatagtattgttagtcgagttggataaattggagaattttttgttcgtcgtagggttgtgtagttttttttttattagaattatttttttttttattttttttattattttagtttttttaaaaatgttatagtggttttgttgtttcgttttaatgataggttgcgtttagggttaatttttatttagttttagcgaacgtttttaaatattattatcgttttcggagggaggcggaaaaattgtgggatgttagagcgagggaatgattggttaaaatgatttatatattttttcgatttcgagatgttatttattaaaaagtagcgttcgttcgttattaaggtacgaatgacgttgttcgaataattatttattgtaataggtttataagtaaataaatatatttttttgttagtgggtaatgaaggtagttttagagtagataaatagatttaggtaggaggcgagaagagataagtgaggaggaaggtttcggttttttgttcgtttcgagttagttttgttcgttcgggggtttggtttcgggggtgaaattgatagtttgattaatagagcgcgtcgcggtatatttttttttttatttaggggtattattacgtttttagtttgttaggttgttttttaggttttaattatgtagcgttttttttatttttttttggatatagatacgtattaaataatagataatggtttgattttttagagtaggttttcgggaaggtttggtttttttttttttttttttttttttttttattatttataagttgggggtataagtggggggagataagggggaggatgtaggaagagttgcgtaaggagaagattttgcgttttttttatttggattatttatttttcggatttcggaattaaatatgtattttatttaataaatag

SEQ ID NO: 16 - DNA, 5338 bp, Artificial Sequence
  chemically treated genomic DNA (Homo sapiens)
ttatttgttaaataaaatatatatttggtttcgaaattcgaaagataagtaatttagataggagaggcgtaaggttttttttttacgtaattttttttgtatttttttttttatttttttttatttatgtttttagtttgtaaatggtaaaaaaaaaaaaaaaaaaaaaaaaaaaaattaaattttttcgaggatttattttggaaagttaaattattatttattatttaatacgtatttgtgtttaaggaaaaatgaagaaggcgttgtatgattaggatttaaggggtaatttagtaaattgagagcgtaatgatgtttttaaatgaagggggaaatgtgtcgcggcgcgttttattaattagattgttaattttattttcgaggttaaattttcgggcgagtagaattggttcggagcgggtaaaggatcggagtttttttttttatttgttttttttcgttttttatttggatttatttgtttgttttgaagttgtttttattatttattgataggagggtgtatttatttgtttataaatttgttataataaatgattattcgaatagcgttattcgtattttaatgacgagcgggcgttattttttgatgaatgatatttcgggatcggaaggatgtatgggttattttgattagttattttttcgttttggtattttataattttttcgttttttttcgaaagcgataataatatttagaggcgttcgttggggttgaatgagaattagttttaggcgtagtttattattaggacgggatagtagggttattgtgatatttttaagaaagttgagatgatggaaagaataagaaaagagatgattttgatggagagagggttgtatagttttacggcgggtaagagattttttaatttgtttaattcggttggtaatgttgtgttcgaggttttggaaaattcgtagtattcggttcgtttaagttcgcgtttgtcgtttgtttttttgtatagcgttttgggagaatttttcgttaagggtaaattcgaaatagatattttgtttaatttgtagtatacgggtagcgaaagtatcgtttttttcgaaatttttttcgtcgtcgagagtcgtaagaagtcgggttattatttagaggcggtcgttgaggtcgatatgagtagcgacgtggaggtgggttgtttcgcgtttcgttttttcgggggtttcggcgtcgtttagtttaaggaaaataatggtaaaggtaatcgcgtcggtcgtatcgcgttttttagttttattttttttgttttttcgcggttttcgttagtttttttcggtgttttttttttttttagattttttataggtaagttatatcgagttagtacgggcgggggcgggacgtatgtttgggatcgtgttttttagttttgttttttgagttttttcgttaggtttaggtttgcggagtttggaatattaggtttattcgttttcgtttttgagttcgagaaaatgtttttgcgttcgtgtttaagagttcgagcgagtcggtagatttttagttagtagtcgagttgtttttgggaaaggtattttgggtaattattttgaatttttttgtttttgtgtttttagggttggagggggtatttttttgggtaagtcggaggaagtttcgtcggcgtttttgtttaggttagcgggagaaagagttgaaaagtatattttattttttattggtttgggtttgagttattgttgtgttggaatttttaaaatatttgaaatttcgaagatttagataaaggttagaggtcgtataaaaagttgttttgcggtttttagattatgggaaatttagagttttttaaattgcgtttagaggtaggtattttttttcggttattttttttttttggttgaaaatttttaattattaaaaaagaaattttttaatttcgtttttattatttgtttatgaagggttttttaaattttattgattttattaacggtagtaatttgtaagtatgatagattttattaatttcggtagcgatttttttttttgacggggttttttcgattcgcgcgtagcgttagcgtcgggttgttggttttatagttatttatgcgttgttggtcgtttgtttgttagggtacgtagagagcggttcggttgtcggtattacgacgtcggcgtcgggtttaggtttcggaagtttgtatggaggtagcggaggtagcggcgggagcgcggcgttgggtggtttcggttttggcgcggattaagtgcggcgttatcgtacggcgtttattcgcgagtagatcgcgcgtttggagaaggagttttatcgggagaattatgtgtcgcggtttcgtcggtgcgagttggtcgcggtatttaatttgttcgaaattattattaaggtattaattttagtgtatgtttgttttggttttttcgggggtatttgggttgattgtttttttttttttttttttttttttgggtggttagatttagttaagggtttggaaattcgcggggggtagttattaaaggaattggtttatttatttttcggttatcgaattcgaacggttgttcggtttgacggatttaagaaggttttcgaatggtgattttaatgttgaaagtattcgtttttgttttattgtgtttaacgtttggttagatgttttttcgtttatatttacggttttatttttttttaggcggtaagtttagttggtttttgttttttaagtaggaattagaggtgaaattttttatttgtttttgagtttggagatttatttttcgtataaatcgttatacggagaaaaggatattgtatttttaaaatcgattggtttgagatagtagttttttgaatattttttttttgggtaacgaaaaaagggtaattttttgcggggaaaaatgtaacgaaattgtttttatttatatataattttaggttattaattttattatacgtttgggagagatagtcgggaggttaggcgatttggtgagttttttatggagcgttcgatattgtagaaaaaagaaaaaatttttacggggtaggggaggagtgtggaagtttttttttggtttgatcgggttttttttaatttagagttgtgacgaatgatgtttttattagatagtgttgggaggggtggaaacgttttttttttcgtttatggagatattgttttatttatttatttaaggtaaacgattttaataaaattatttttttaatattaaaatcggattcgtgtttttaggggtaggtttttgtagttcggagggtttaagatttcgcgcggcgattttttagaaaagttgagcggtagtttttttttaaaggttgtttagaattttcgtataaattttgggattgagagacgggtgtttagcgagatcggtattggtgggtggcgggagggagaggaaaggttggattgggataaaaaagtgtagtaagaagtaagggaataaaagtttgaggagtagtagtagtcggacgcgggggagaggatttttttcgttgaggacggtgtgtttacggcggtttatatattgtcgtttatatttttttagttgggagattatagggtattcggggttgggtttggtcggagagaagtagattaagttatttagaggttcggaaggggtagaggttttgggataggagttgggaatacggggcgttttttaatttaggttgcggcgcgttttttttcgtaggtgtggttttagaatcggcgtatgaaggataagcggtagcgtttggttatgttttggtcgtatttagtcgattttagtttttatatttatatgatgacgtacgcggtcgttatcggaagtttgttttattttttttattcgtacgtgtcgttgtattattattcgtacgtgggcgttacggcggcggcggtcgcggttgtagttttaggcgcggcggtcgcggtttcgtcgtttttcgttatttttattcggttattggatatttttcgcgttttttcgtatttttattttcggtcggagttgttgtgtagttttcgttattttggtttttattaggttttcgcggtcgtcgcggggtttaatagcgcggtttttgtcgcggtagtcgcggtagtcgtagcggttgcggttttttcggcggcggcggtcggcgcgttttttagcggcggttttgtattttgttcgtgttttagttgttatagtagttagtcggcggcggtagtcgcggtagtagttgtcgtagttttgggttttcggggtggcggtggcggcggcggtggtggtggtggcggcggcggcgggggcgtcggggtcgggggaggttcggatttcggttgtagcgcggcggcgtcgcgtttcgagagcggttttttgttttattcggtcgcggtgtttagtaagacggtcgtgagttcgtcggattagagggacgaggtttcgtttattagataattacgtcgttatcgttagggggtcgcgttcgtttttttgagtgtgttcgggagttttttgtgcgttttttgagtttttcgcgcgttgttcgttgttgtcgttgtcgttagggggcgtttcggggcgcgggaggtcgaagggaatttgtttcgaattgggggagaaggagtaggcgtaaaagtttggcgggtatttttttaaattatttttatttttgtatttgttatttagtcgtttgttttttttttttttttttggttttcgggatttattttttatttttgttttgagcgtttggttttttaaagattaatttttcgttttttaagttagttttggttgtgtatttttaggttcgggttgtttggttgaacggcgtggttcgaagtaacggagaattataataaagatagagggggatgttgtgcgttggtgtttgggggcgggggaggagtcgtttcggaggtttttcgttgttgttgtttttttttttttttttttaacgagggtgggggaggtggtaaacgtttttttagtttgagtttattagggattttgttcgaagagtgcgggagaacggaggtttgataaggtcgggaggacggatggagagcgtgggtagcggtggttgtttgtgagattgtttattacgtttaggagtaaggcgggtagggatgtggtcgtttttttcgggaaggataaagtcgaggtgttggaaggggtggtcgttgcgtcgtttttttttcggtttaatattttttttttttttggtttttggttttagtgttgatggaatggaagtattttgtatattttatgtaaaaagtgatggtaaaagaggttgtt

SEQ ID NO: 17 - DNA, 5332 bp, Artificial Sequence
  chemically treated genomic DNA (Homo sapiens)
ttagttttaaattttgtattcgtattttttagataggaagtttttttttttcgattagggattgagggagaagagatttagaatgtatttttttgttttaggtttttcgggggggatatggttttagatagttatttcgaaattgggtttaggtttttatagtaagtcgagtgtttttttatatttttaatttcggtttttttattaaagtttaaaagatttttttgttttttaggtttttttcgtttggttgtttttattattttttaattgcggaaatattagttattatatgttcgtcggagaataagcgtgagtgtcgcggtggatagttgtcgttaaaggtgtttagacggatggtatttttaaagtagggattttagtattttttttatatattattatttaagaatggtagaggaaagagtaggagtggggttatagataggagagaaaggaggttgaggttataaaattggtatttttttaattattaatttttttttttattattttgttattatttgttatggtaaagttttttttttgtgttttttttttaataaagaaatttttagttagtttttatttattttttttgatttgtaggaagttaaattgttagtagattgagttttttaagggatatttttgggatatgttggaattttgatttgtttaagatgatgacggttattagtataaattagaaataatgttattttttagggtgttatttgtaagtgtaataatacggatttatttgtaaaatttagttaaattgcgtttggataagtgattagatttaaacgataaattttttttattatttagttttttttaagttttgcgggggtagtatagaagattgttttagggtgaaattaaggtttagtttattatttgtgttagtttgagggattttggaaatgttgattttgagaaaaagataaaataaaataaaataaaataaaatttaattataaaatatattttattgtttataaagtaaatagaaatataaagttgtttttaaaattatttttttagtaaataagtatgtgatattttgagtaggagtaggagggagagaaagattgttatttaaaaaaatatgaaagtattaagtaataatttaaaatacggttgtttagaaaaatatttatatttattgtagttgtttaattggtttcgttaaagtcggtaagtatttaaattgtgttataattttatttaaatttcgtttcgttttagtaggttgaagagtttgaatagattaattattttataatgatgatgaatgagaaattaatttagatataagtaagataatttaggtttttatttgtttaaatagttttttaatattattcgttatcgcgggttatagattgaattaattgtttaattttgtgaaagttatatttttgcgtttttatcgagattatttatagcgtagtgagcgttgttgaaaggtatacgttgttaatagggataattatttaaagggaagcgtttgtaaaatggaaaataaatgtcggggttggtaataaatgggattaaaagtagttattttaatttggtttttcgagggaaaggagcgggcgtggttttgtaggattaggggcgtttttgatttttttaagatttaggtgaggtcgagggttttcggcgcgttagtttgcgtcgtggttgtggttgcggtggcgattcgggtcgggtttcgttttcgtcggttttaggttttcgtttttttcgcgtaggtagcgggcgcgtgtggttcgggttgggtaagtcgaggaatagcgagttttcggacgttgattgtaggacgttttagtttgtgttcgggttttcgttttttttcgtacggggttcgtattttcgggtttgggtttgatttatagggcgttgaggtttttgtagttgaagtcggaaggtttcgttgcgagcgcggtataggttgttggtagtttttggattttggaggtttggttttttttttaagtcgatggcggggaaagaatttcgtttttatagttttttcgattttcgtcgtttgttatttggggacgggaagcgcgttcgggtcgttttacgtttttttgggtcggagttttttttatggttggtttttttgggggtttttgggtttgtgagtagcgtttattttttttagagaagaatttttttttttttttatcgaagtgtttttttttgtattttgaaataattttttttgggtgaggttagtttttttttgtcgtttttttttcgtaggcgttcgggagtttcgtgaggatttcgtgtagttgagtttaggcgataggtgtttttttaggtgtttatttgtttttttttaatttgtttagggaaagattagaacgatgtgcgcggggaggtggttttgtttttttcgaaattggcgtttttgggtaaaatcgcgtgtcgcgtttacgcgggttttgttagtgtgcgtgttttagaagagtgggttttttaggcggtattttttggagaagtaagtgaggtgaatttagaatagagaagcgggaacgatcgtttgatgtgtcgagtcggaaaaagagaggagagggagaggtttttagcgagcgcggagatagaggagtttacgcggtatagtacgagttttatttttgttcgcgtagaggtgtgtgtgtgtgtgtgtgtgtgtgtgtgtgtgtgtgtgtgtgtgtgtttttttttgtatttttgtgtttgaaataaaagtttaattaacggatttttggtgttttgaggatttattttcgggagcgattttgatgtattgttgtttaattagtgtttttaattggtgttttcggagataggtaggttcggagttgggatagagttttttttcgttttttttgtatattggaaaggtaaaatttataatatattgtggttattttttgggagagcgaaagagagtgggaggtagggaagaaagggagagatgtagttgtttgtagaggacggagtttttagtttcgggggtcgtggggaagggtttagattatcgggttcgatttagttttttgtgtaagagggttcgggtcggttgagtcgttgaggattatgaatttgttcgtagaaaggtttagggagtttttattgtttgtataaatttattttatgtggtttattatttcgttaataatggttgtttgttaataaggatgcggaggttaaataattcgggtggaagattaaatacgttttattaaggcgtttggaagtcgcgcggtgtagagatttgcgttggagtcgtttggtttattggagtttggagggagatgggagtatagtttgtaaggagtttcggggtagaagaggaggtaaggtttagtttttttttttagggtgttttgttatgttaggataggtttaatttttttatatgttaaatagaaaatttatatagaagttagttttaatgaggtgtggaggttaaattttcggagtagttggttggagggtagatatggagtatttggggtttgaattaaaggtttttttttgaggaggggtggttattttttgttttttagtttttatatgttatgtatttggtaatttgtgtttatatgggattagtattggattagaagatagaagatgtggtttttagtttgggttttgtttttaaattattgtagaatttttattatattatttttttagttttatttttttattgtgtaagagaaaggagatggggtttgatgtagatgatgtatagtatttttttttttgtttagttttttattagagttagggaattgaatattttataagatgttttgttttttttaaattttgtaggatgtagttaaaaagaattttatttagtaaatatttgagggtttattttgtattagttatggtgtagtatgtattttttaattgagagtagaatattagtttatatttttttgttatttttaaatataatgttttataataaaagatgaaagagaaagaattttaaagagaatagaataggatgggtatgtatgtatagggtagagaaattatggaggtaaaggtaaaggtattgataaaagttgtgaagaatttgttgaattggtaaggaagttagtggataaatattgtagaagtagttttttaatagagatattatgtaggagagtagagagaaggtttttttttgaattttggtgatttggtagagaataaaagggtaagggttgtagaatttgattaggaggtttaagttgtatgtatttaatattgttaatttttggtttatatatttttttagtagttggaatttttttttttttttttttttttttttttttttttgagatggggttttgttttgttgtttaggttggagtgtagtggttttattaaggtttattgtagttttaaatttttaggtttaagtgatttttttattttagtttttcgagtagtaagggttataggtatatgttattatgtttggataatttttttttttggttgaggggtatagatggggttttgttgtgttatttaggttggttttaagtttttaggtttaatgaatttttttattttggtgttttaaagtgttgagattataggaatgagttattgtgttcggtttaggaagtttattttttagttaattttgaaatattattttttgaatttattaattaggaaattcggttgttaggttgggattttttaagtttttgggtgatgggtatttagttttaaggaaggtaatgatgtttaaattattaaattatgttttagtttttgtgagttaggaatttagtgagtttagttgtgtgtttttggttttaggttattttattggggttgtggttttatttaaagatttagttgggtgaggatatgtttcgggtttatttatgtggttgtttggtaggatttagttttttgttggtgggttatttggttgaaggttttagtttttttttggtggttggttagaggtttttttgttttttattatatgagtttttttatagggtagtttataaagtggtagttgtttttttttagattgagtaagtaagagtgagagtggaggggggagaaagtatttaagatagaagttatatttttttggttatttaattttggaagtgattttttattattatgttatattatatttgttagaagtgagttattagatttagtttatattaaaggaaaggggattatagaaggtattaaatttaggaggtagggattattggggattgttttagaggttgttgtttagattttttttatataatagttttgaggtttatatggt

SEQ ID NO: 18 - DNA, 5332 bp, Artificial Sequence
  chemically treated genomic DNA (Homo sapiens)
attatataagttttagagttgttatataaaaggggtttgggtagtagtttttaagatagtttttagtgatttttgttttttggatttgatgttttttgtaatttttttttttttagtgtgggttggatttagtgatttatttttaataaatataatatggtatagtgatggaaagttatttttaagattagatgattaaaagagtgtagtttttgttttgggtgtttttttttttttttatttttatttttgtttatttagtttgaggaaagatagttgttattttataagttattttatagagaggtttatatggtaaggaatagagaaatttttggttaattattaagaaggaattgaggtttttagttaaatagtttattagtaaggaattgaattttgttaaataattatatgagtgagttcggaatatatttttatttagttgagtttttagataagattataattttagtggaatagtttggagttagggatatatagttaagtttattagatttttgatttatagaaattgagatatggtttagtgatttaagtattattgttttttttgaggttaaatgtttattatttagaagtttgaagagttttagtttagtagtcgagttttttgattggtggatttagaaagtaatgttttaaaattagttaaagagtaaattttttaggtcgggtatagtggtttatttttgtaattttaatattttgggatattagggtgggagggtttattgagtttagaagtttgagattagtttgggtaatatagtaagattttatttgtattttttaattaaaaaaaaaaattatttaggtatggtggtatatgtttgtggtttttgttattcgggagattgagatgagaggattatttgagtttgggagtttaaggttgtagtgagttttgatggggttattgtattttagtttgagtaatagagtaagattttattttaaaaagaaaaagagagagagagagagagagagaaattttaattattgaaagaatatataaattaaaaattggtaatattagatgtatataatttgggttttttagttaaattttgtaatttttatttttttgttttttgttaaattattaggatttaggaggggattttttttttatttttttatatagtatttttgttaaggagttatttttgtagtatttatttattgatttttttgttagtttaataagttttttatagtttttgttaatgtttttatttttatttttatagtttttttattttgtatatatatatttattttattttattttttttgaagtttttttttttttattttttgttataaaatattatatttgagaataataggggaatatgaattgatattttgtttttagttaaaaaatatatattgtattatgattggtgtagagtaggtttttagatatttgttaaataaaattttttttgattgtattttgtaaggtttaggggagatagagtattttataaggtgtttagttttttaattttggtgggaagttggataaaagaagaaatgttgtatattatttatattaagttttatttttttttttttatatagtagaaaaatgaagttgggagaataatgtaataaaaattttatagtgatttaggggtagaatttagattagaaattatattttttgttttttaatttaatgttaattttatgtaggtataaattgttagatgtatgatatgtaaggattgggaggtaggggatggttatttttttttaaaagggggtttttggtttagattttagatgttttatgtttgttttttagttaattatttcgagggtttgatttttatattttattggggttgatttttatgtggattttttgtttgatatgtggaagagttagatttgttttggtatagtaggatattttgaagagggagattagattttgtttttttttttatttcggggttttttgtagattgtgtttttatttttttttaggttttagtgagttaggcggttttagcgtaggtttttgtatcgcgcggtttttaagcgttttgatgagacgtgtttaattttttattcggattatttaattttcgtatttttgttaataaatagttattattaacgagatggtagattatatggggtgggtttgtatagataatgagagttttttaggtttttttgcgagtaaatttataatttttagcgatttagtcggttcgaatttttttatatagaaaattgagtcgaattcggtggtttgggtttttttttacgattttcggggttggaggtttcgttttttgtaaatagttgtattttttttttttttttttgttttttattttttttcgtttttttaaggggtggttatagtgtgttataaattttatttttttagtgtgtaggagaggcgagaggaggttttgttttagtttcgggtttgtttgttttcgaggatattaattaaaggtattaattggatagtaatatattaaagtcgttttcgggagtgagtttttagagtattaggaattcgttagttgggtttttgttttaaatatagaaatatagaggaaaatatatatatatatatatatatatatatatatatatatatatatatatttttacgcgggtaagagtagggttcgtgttgtgtcgcgtgggtttttttgttttcgcgttcgttgggagtttttttttttttttttttttttcggttcggtatattaaacgatcgttttcgtttttttgttttgagtttattttatttatttttttaaagagtgtcgtttagaaggtttatttttttgggatacgtatattaatagagttcgcgtagacgcggtacgcggttttatttaagagcgttagtttcgggagaaataaaattattttttcgcgtatatcgttttggtttttttttaaataggttgagggagggtaagtagatatttggggaggtatttgtcgtttggatttaattgtacggggtttttacgaggttttcggacgtttgcgggaggagggcgatagaggggaattggttttatttaggaggggttattttaggatatagaaagggatatttcgatgggggaaggaaaggatttttttttgagggaagtagacgttgtttataggtttaagggtttttagaggagttagttatggaaagggtttcggtttagagggacgtgaagcgattcgggcgcgtttttcgtttttaaatggtaagcggcgggggtcggggaagttgtggaaacgaggtttttttttcgttatcggtttagaaggaaggttaagtttttagagtttagaagttattagtaatttgtgtcgcgttcgtaacgaggtttttcgattttagttataaaggttttagcgttttgtgggttagatttaggttcgggggtacgagtttcgtacggggagggacggagattcgggtataaattgggacgttttgtagttagcgttcgggggttcgttgtttttcggtttgtttagttcgggttatacgcgttcgttgtttgcgcgagggaggcgggaatttgaagtcggcgagagcgaggttcggttcgagtcgttatcgtagttatagttacggcgtaggttggcgcgtcggggattttcggttttatttgggttttggggaggttagaagcgtttttaattttatagggttacgttcgtttttttttttcggggagttagattggaatggttgtttttgattttatttgttattaatttcggtatttgttttttattttataaacgtttttttttaagtaattgtttttgttaatagcgtatattttttagtagcgtttattgcgttataaataatttcgatgaagacgtaaggatatgatttttataagattggataattgatttaatttgtgattcgcgatggcgaataatattggaaggttatttaaatagatgaaggtttaaattgttttgtttgtatttgaattaattttttatttattattattatgaagtgattggtttatttaagttttttagtttgttggaacggaacgggatttaaatgagattgtaatataatttaaatgtttgtcgattttaacgaggttaattgagtagttgtaataaatataaatatttttttaaatagtcgtgttttaaattattatttaatgtttttatgtttttttaagtggtagttttttttttttttttgtttttgtttagaatattatatatttatttgttgaaaaggtgattttggaaataattttgtgtttttgtttgttttgtagatagtaggatatgttttgtgattgggttttgttttgttttgttttgttttgttttttttttagagttaatatttttagggttttttaagttggtataaatggtgagttgagttttagttttattttaaagtagttttttgtgttgttttcgtagagtttgggaggagttgagtgatggaagaaatttgtcgtttggatttagttatttatttagacgtagtttagttgggttttgtaaatgaattcgtgttattgtatttataaatgatattttgaagagtggtattgtttttgatttgtattgatgatcgttattattttgaataaattagaattttaatatattttaaaggtattttttagaaagtttaatttgttggtagtttggttttttgtaaattaaaaggagtaggtggaggttgattgaggatttttttattagggaaggggtatagaaagagaattttgttataataaatggtggtaggatggtggaggagggggttgataattagagaaatgttaattttgtggttttaatttttttttttttttatttgtaattttatttttatttttttttttattatttttgggtgatgatgtatggagaggatgttaagatttttattttgagaatgttattcgtttggatatttttggcggtaattgtttatcgcgatatttacgtttatttttcggcggatatatggtggttggtgttttcgtagttggggaataatggaagtaattaagcgggagaagtttgaggaataaaagaattttttaaattttagtgaaagggtcggggttggggatgtggggggatattcgatttattgtgaggatttgagtttaatttcggggtgattgtttaaggttatgtttttttcgaaaggtttagggtaaggagatgtattttgaatttttttttttttaatttttggtcgagggagagggattttttgtttggagagtgcgggtgtagggtttgaaattag

SEQ ID NO: 19 - DNA, 4215 bp, Artificial Sequence
  chemically treated genomic DNA (Homo sapiens)
ggtgttcgattaagcgtagttcgtagtttgggtattgttaattgattttaattttttttatggtgagaggatggatttttcgttattttttcgtttaatttggtatttatttatttatttatttattacgttcgttgggcgtatttaagtttaatttcggggcgtacgcgttagcgtagatatcgtatttttttttttttttcggttaattttaggtagaattttaaaataattgtttttttttttacgatttagatgttgcggttcgcggataggaggtttaagaaatagtatatttcgagcggtaggtagcgaggcggaaacggtcgtcggttttagtggtggttttattggaagtcgagtttaggagcggttaagcggtcgtcggggaaagtatcggggttttttagggtttttttcgagtttttatttcgtattttcgagggcgtgaaaattacgggagtcgttttatttcgcgcgtttagtttcgttttagtttagatatcgtttttcgttagttttttttgcggcgtttagggaggacgcgtttcgtttttttttaattcggttaatgggcgttcgggtagcgcgcggtttgttttcgttttcgttagggaaatttggaggaggagaaaagtttgtatagagggtggaaaggcgagagcggagttttaagttcggtagttcgagaggaagatgaatagttttaggttagagtttttggtagagtggatttcgagtcgtttttaggtagttaggagcggttttagcggtagtcgtaaattttagtagtcgttcgtgttgttcgtggttggggcggagggtagttagagttggggattaaggtttcgcgttatttgcgcgtatagttttatatttgaacgttgttttttcgtagacgagatcggcgggtattgtaaagttgggattcgtttttgaaggaaaaaaaatagcgagtaagaaatttagtattattttttattgatttatttcgttgtattttttgttttttaagtttttgaaagttggtaattttgatttcggtgtttaaaaatcgatagttattgagatcggttttgagaagtcgaagatttggtagtttttagattgagtaggataaggtgaaagtaggttggaggcgggtttaggatatttgagggttgattttgggggttcgtgaggttgttatcgttgttgtcgttataggtgagatggcgttgggttgacgttggggttaacgggtagagaacgtagggatgcggttttcgtcgaagagagttaagaagggaagagcgcgttttttaaattgtttttgtaatttgtttttagtgagtattttattgatttagaatttatcgagaatagtattagcgagttattttttttttgagatgggttttatttattttggtaatggagtgagttggattgtggggaggaagaggaatgggaaaattagtttataaatattaatgttagtaagagtgtgttgttggtaggacgtatcgcgagtttggagattttggtggtcgtagttggtaagtggttataatttagaaagtaggatcgagttgttttttttgttttattagtgtatcgtttttcgggcgcgggtttaatattttataagtggtaattttcgtttacggtagttttgttttttttttattatttttagatttagttttgtattttaaggttgcgtatcgttagttattattatgtttattttcggggttaattcgttcgtttttttgagtttcgatcggttgaatagtttagtgattatttcggcggtgatgtttattttcggggtggtgggtaatttggtggttatcgtggtgttgtgtaagtcgcgtaaggagtagaaggagacgattttttatacgttggtatgtgggttggttgttatcgatttgttgggtattttgttggtgagttcggtgattatcgttacgtatatgaagggttaatggttcgggggttagtcgttgtgcgagtatagtatttttattttgtttttttttagtttgttcggttttagtattatttgcgttatgagtgtcgagcgttatttggttattaattatgtttatttttatagttattacgtggataagcgattggcgggttttacgttttttgtagtttatgcgtttaacgtgtttttttgcgcgttgtttaatatgggtttcggtagttcgcggttgtagtatttagatatttggtgttttatcgattggattattaacgtgacggcgtacgtcgtttatttttatatgtacgcgggttttagttttttttttattttcgttatcgttttttgtaacgtgtttgtgtgcggcgcgttgtttcgtatgtatcgttagtttatgcgtcgtatttcgttgggtatcgagtagtattacgcggtcgcggtcgtttcggttgtttttcggggttatttcgttgtttttttagttttgtcgcgttttagcgattttcggcgtcgtcggagttttcgtcgtatcgcgggcgtcgagatttagatggttattttatttattgttatttttttggtggtgtttatttgttttatttcgttcgtggtgagtgatcggggttggggttttattcggtttttttttcgtatttatttttcgcgtttatttttcgttttttgttttttttttgagtttttggtagtgaacgtgtcgtttttaggtcggggttgggatttttatattgttttttagagtaggtttaattttttttgaagttttaattttaacgagatttagtaggtgttttgtttttatattttttagtttatgttttcggaagtttgggtttttttttttatcgagatagtttttattttttgttgtttgatattggtcgagttttttaagaaaatttttcgttttttttgttagacgtggaggggagtttgttgtagtgtgatttagtttattttttcgtattgtgaattgtgaattgtaaaatttgaaatgttagggatggtgatttgttcgttgtaaattatttttaaggaaagtggggtttttggtgttttgatgtatgtaaggttttttgaattttttttttcgtggattgcgtagaattttaaagttagaagagatattaagaggtgttttagtttaatttttttattttattgagggagtgaatgatacgtttaaaataatttagtcgaatttatatagttaagttaggttttttgttttttattatggtgtgttttgggagggtagtttaaagtatataaattttaatttatatatagggtagggtttagatttagttttttttattttgtttagattaggaaagtaaagttttttagggtgattaattatggataggttgatatatatagggtatgggatttgaattttcgataattgtgcgaggtatagtattattttagagaaatcgaggtttagagatggttgtttttgtttttttaagttaaagttttatagtttgtaatggattttaggtcgtttgaggttagatttagtttatgtgttattatattacgtttttttcgtagaatattttttattttggcgtttgtaaagcgtgggttggagttttggtatattttatttttagtttattttttaagaattgtttttggattaatttttaaaatatgataaatagaaaggtttaaattttatttagttttttattttgtttgtggttaaaatggaatgtattagaagtagatgggtagaataatgtaatattttatttagagttttttttgaaagtaattagttatgagtttttttattttttaaaatattgtatttttggaaattttaaattattaatttaaaaagagataattgtttttttttatgtttgttgggaataagagaatataaaatgtaatgggttattattttttttttttttttattgatattgtttagggatttttggtgtaaaaatatatttttgataaaagtgattgtaaatggaaggaatttagagggggtttagagttagaatatagtaggtttttattaatttgtataaatagaagtaaatataataggttataagagtttttaagttattttaggatttaatataatttatagagttaagttatatttgagttatataaatatattttattgtttgtaatggtaatttagaataaagtgagattttggaagaaataatattgtttttgatggg

SEQ ID NO: 20 - DNA, 4215 bp, Artificial Sequence
  chemically treated genomic DNA (Homo sapiens)
tttattaggagtagtgttgttttttttaaaattttattttattttaggttgttattatagatagtaaaatatatttatgtggtttaagtgtgatttaattttgtaaattatattgggttttggaatggtttaaaggtttttatggtttattatatttatttttgtttatataaattggtaagaatttattgtattttggttttgagttttttttaagttttttttatttatagttatttttattaaagatatatttttatattaaagatttttggatagtattaataaggaaaaggaaggaataatagtttattatattttatatttttttgtttttaataagtataagaaaaagtagttatttttttttgagttggtagtttagaatttttaggaatgtagtgttttggaagatggaagaatttataattagttgtttttaagagaaattttagataaagtattgtattattttgtttatttgtttttggtgtattttattttagttataggtaaagtagaaaattaggtagggtttgagtttttttgtttattatattttaaaagttaatttaaaggtaatttttaaaagatgaattaaaaatgaagtgtattaaaattttaatttacgttttataaacgttaaaatgagaaatgttttacgagggagacgtgatgtaataatatatgagttgggtttggttttagacggtttaaggtttattataagttgtagagttttggtttgaagaaataaagatagttatttttaaatttcggtttttttaaaatggtattgtatttcgtatagttgtcgagaatttaaattttatattttatgtatattagtttgtttataattagttattttgagaaattttgtttttttggtttagatagaatgaaagaaattgagtttggattttgttttgtatatgaattagaatttgtgtgttttaagttgtttttttagggtatattatggtaaagagtagggagtttagtttgattgtgtaggttcggttggattattttaagcgtattatttatttttttagtgaagtgagggagttagattaaaatattttttgatattttttttagttttaaaattttacgtaatttacgggggaagaaatttaagaaattttgtatatattaaaatattaaaaattttattttttttaaaaatggtttataacgaatagattattatttttgatattttaggttttgtagtttatagtttatagtacggaggaatgggttaagttatattatagtaggtttttttttacgtttaatagagggggcggggggtttttttggaagattcggttagtgttaggtagtaaggggtaagggttgtttcggtggagaaagaaatttaggttttcgggaatataaattgggggatgtaggggtaaagtatttgttaaatttcgttagggttgggattttaaagagggttgggtttgttttgagaaatagtgtgggaattttagtttcgatttaaaggcgatacgtttattgttaaggatttagagggaaagtagggagcggggaatggacgcgggaggtggatgcgagaaaaaggtcgagtagggttttagtttcggttatttattacgagcgggatggagtagatgagtattattagggaggtggtaatgagtaagatgattatttggatttcggcgttcgcgatgcggcggaagtttcggcggcgtcgaaagtcgttgaggcgcggtaaggttggggaggtagcggggtggtttcgggaggtaatcgaggcggtcgcggtcgcgtggtgttgttcggtgtttagcgaggtgcggcgtatgaattggcggtgtatgcggagtagcgcgtcgtatataagtacgttgtagaggacggtggcgagaatgaggaaggagttgaagttcgcgtatatgtaggagtaggcggcgtgcgtcgttacgttggtggtttagtcgatgaagtattaggtgtttgggtattgtagtcgcgagttatcgagatttatgttgggtagcgcgtaaaagagtacgttggacgtatagattgtaaagagcgtgaggttcgttaatcgtttgtttacgtagtggttgtagaaataggtatggttgatggttaggtagcgttcgatatttatggcgtagatgatgttgaggtcggataggttgaagaagagtagaatgaaggtgttgtattcgtatagcggttggttttcgggttattggttttttatgtacgtggcgatggttatcgggtttattaataaagtgtttaataggtcggtgatagttagtttatatattagcgtgtagaaggtcgtttttttttgttttttgcgcgatttgtatagtattacgatggttattaggttgtttattatttcgaagatgaatattatcgtcgggatggttattgggttgtttagtcggtcggggtttaaggaggcggacgaattgatttcgggagtggatatgatagtggttggcggtgcgtagttttggagtgtaaggttgggtttggggatggtagaagagagataaagttgtcgtgagcggaaattattatttgtaaggtgttagattcgcgttcgagaaacgatatattgataagataaggggagtaattcgattttattttttggattgtagttatttattaattgcggttattaaaatttttaggttcgcgatacgttttgttaatagtatatttttgttgatattaatatttataaattgatttttttatttttttttttttttataatttaatttattttattgttaagatgaataagatttattttaagggaaaagtagttcgttagtgttattttcgatagattttgaattaataaaatgtttattgaaaataagttataaaagtaatttggagagcgcgtttttttttttttggtttttttcggcgagggtcgtatttttgcgttttttattcgttgattttaacgttagtttaacgttattttatttgtagcggtagtagcggtggtagttttacgagtttttagggttagtttttagatgttttggattcgtttttaatttgtttttattttgttttgtttagtttggaaattgttaaattttcggttttttaaagtcggttttagtggttgtcgatttttggatatcgaggttagagttgttagtttttaaaaatttgggaaataagaggtgtagcgggatgggttagtgaagaatggtgttggattttttattcgttatttttttttttttaaagacgagttttagttttgtagtgttcgtcggtttcgtttgcgggaggatagcgtttaggtgtgaggttgtgcgcgtaggtggcgcggagttttggtttttagttttggttgtttttcgttttagttacgggtagtacgggcggttattggagtttgcggttgtcgttgaggtcgtttttggttatttgggggcggttcggggtttattttgttagaggttttggtttggggttgtttatttttttttcgggttgtcgggtttggagtttcgttttcgtttttttattttttgtataaatttttttttttttttaagtttttttggcggaggcggaggtaaatcgcgcgttgttcgggcgtttattggtcggattggaagggggcggagcgcgttttttttgggcgtcgtagggaagattggcggggggcggtgtttgggttggggcggggttgggcgcgcggggtggggcggttttcgtggtttttacgttttcggaggtgcggagtgggaattcggaggggattttgggaagtttcggtgtttttttcggcgatcgtttagtcgtttttgaattcggtttttagtggggttattattgaaatcggcgatcgttttcgtttcgttgtttgtcgttcggagtgtattattttttgaattttttgttcgcgggtcgtaatatttagatcgtggaagagagggtagttgttttaggattttatttagggttggtcgagaaaggagaagaaatacggtgtttgcgttagcgcgtgcgtttcggggttagatttgggtgcgtttagcggacgtggtaggtgggtgggtgggtgggtattagattgggcggggaaataacgaagaatttatttttttattataaaaggagttggagttagttggtagtgtttagattgcgggttgcgtttggtcgggtatt

SEQ ID NO: 21 - DNA, 5473 bp, Artificial Sequence
  chemically treated genomic DNA (Homo sapiens)
gtaatgttaattagttttattttaaagaaaaattaaatattagagtaaataatgatttttttgcggagaaggagttgtaagggttggggagaggtaattagtgttataaaagttttattataaagaagtttagaatttttttgttttgttgtgtagtagagtgaaatatagtagtagaataattgtgtattattattatgataatttaatttgtttttttagaaaaagttattgtttgtagttaggatagtaggaaaatatttagaaaataattaaaatgtaaataaaagtatgaaataataataaagtttattttttaagagaaaaaaagaagagtatttagcgaaaggagaatgaagtatatataaagtaagtaatttttaggtattttgtttttttggatgttatttgtttaaatttgataatttttataggtagtatgatagattttttaaaatttaaataaagtttgtttttgtattttatttttaataataaagtatattgattgatttataaattaaagtttttaaaattttattaaagtaaaaatattgttttagagtttttattggtatgtttttgaaagtaagtgttatagttaatgtaaatttttaaaaatttttttgttatttagtataatagagggtggattttgtgttagggtggtattttttgtgtaatttatatggtttgaggttttttgttttttttttttttagaagagttggaattaagatattaataattataattgtaataattattattatgtttttaaggggttgttgagtttttggagattttagtgtatagagcgaagtaggagaggtttaaaaaggaaggttttgttgttgatgttgtgatgattaaggtagtttattattattttttttttttaacgtgattgttttgttttttttttttttgattttgttataagatgtggggaagttttttaagaattgtgtatagttcgttatagatggtggtttttgtgtttagagatcgaaagagtatttgttatagcgatattttgtaatagttgtagatgtgcgggtttaaaattgttttatgtgtttaaattaataataattattattttattttattttattatttgagcggaaatataatttgaaatatttaaatttgttttttttaaagttagaaggatatgtgtatgtgaatgtatataatttgtttttttaaatgtttttaaagtttatttttgttattatatttgtttttataattaataaagaaaatttgttttagttttaattttattgggtatggtacgtgttggagggtaggttttggaaatataaatattaatatatgtggtttgttttaaaatttaatgtatttagggttagtttcgttgttttggttaaatgaatgaataaagagtgattaaaatgcgtttattttttcgttattttatatatagtttgagatcgatcgttaatagtagattgtaaatttttgtatttaatagttattaattttttttatagtttgtatatttataaatttaattgggatattcgtttgataaatttagattttgtagagtagatttttaaggaaatttaattttagagaataaaatattttttggaatttttaaggtatttagagataaaacgttttttgtgggatttttttttaagttttataaaagtaggtttattaggattaaattatattaaagttagtgcgaggtaaggggggtgtggtttatagaaattttgggagaaagtttagtatagttttttttttttgggaatatatgttaggatggaaaaaaaaaaaaggaggggagtgttataggattaagatttattttggaaaataagatttttagtaaagatattttttttttttttattttatattagatattagaagtattatttttcgagtgtgttttttaagtttttttttaattttaggttttttttgttttttgggttttcgattttttggtagttgggtatttgtattcgggttttcgataggtttagtcgttggtttagtttttttcgtatgaaggcgtcgggatagtgggtttcgttaaaaagtttttttagtttattgagttgttttagggtgaaattggttcgatttcgtttttgtttgattttggtttggttttcgttttttatttttttcgtattttttttgcgattttttagtttcggggatattggagggggtattttagcggggttatacgtgtatttatacgaatatatatatatacgtatatatatacggacgaaaatagtatagtaaattttgttattagatttgtcgtaaaaaagaatagagaatttttttttttcgtggaattttggttcggttttttaatttattcggaggaagaatatttcggagaagcgtaaaggttaagtttgagcggtcgtttggggtaaggtgggtagttatttattattttttttataaacgtatttcgatttatcgttttattatttattttttagttatcggttttttttagtaaatattaaatggtttttatttattttcgtatttatttgtttcgtagtatttatagaaattaaaggcgtagcgttaggttttttatagagtaaagtttggatataagggcgcggtaaggttatttattggttttttatatcggttatttttagaaggttggttcgtttttaggttagtttttattatcgttggttttttgtttatcgtaaatttgttggtttaatttaggaataattgggtcgaaaggtattagcgagagtaatagatttcggtgttgtgtcgtatagggagtcgtattcgtagacgtttttcgttgtttttgggttcgggttaaattttgtataaggttttttggatagttaggtaattttcgtttcgtttgttcgatcggggtcgtacgagtataggcgtttacgttatgttggttgtttaaagggttcgtcgtttaagtcgggttagaaggtaggaggcggaaaattagttttcggtggcgggcgaaagtaatcgttttttttgtttttttttcgttttttttcgtggaaacgtagattcgattttaaacgtttaatttatagagattaataggtttaagcggaatattcgcgattttcggtttttattggttgtttaaagtttttttatgtaattagtagttcggatgtttaataaaatatgaatttttttgttttgggtttgtatatattcgttgttatttttttgttttttttttttttttaaaaataggagtttttttagtgtgagtatatatagttattatatatatatttttttggaatttttattttttgcgttcgaattagagatttcgggttttaagaagttaaagttgagtttagatagtcgaggttgtttgtagttttttttagcgtaggatttaggttagtatgggtgttaaaaattattttcggaagagtcggtttgtagagaaattaatatttgttttgagtttggaaattaataattttaggaattgcgttcgtcgggggtttagatttgaatttcgtcgttaggcgcgttggcgaatttgtagttcgggtttgtagttgtggatttatggtcgggaggttgtattgggtattttgacggtaattttattattttataaatttaggaagatttggtgttggtttggaggaagaagagtcgttagatttcggttttgtcgggtattttagttacggtgattttaaatattgtcgtattttttagtttttagagttagttttgtggatatttgttttttttttaggaaggaatattatagtaaatattatgggttaatttaatagtaaagtatttttattgatattgtattgaaatttaaatatgaaaatatattttttaaattttgttaatgaggtgggaaggttttgtttattatatgttatttatatagtggatgttatttaaagttttggggtttcgaggagatgtttaaattttaagttgatttatagatttaataaaatttttatttttgtttttaaatttttaattattgatttaaataggaatagatcgtgttataaataatttaattgtttgtttaaatatgtgattttacgtatgttatatatttttttaattggaaaaatatggtagtatattagttattgtaggtattaagtgttaaattaattttattgttgaatttttttgaattggtatagaacgttttgttattgagataaagacgttttttaatattgagttagtattaaaggatttttgttttaagagaatcgagtattgggtgattgaaaatattaaaggaattgtgtaaatatagatttttatttttttcgtcgtttttttttttcgtttttaatatattaagaaatcgaaacgtttcgttcgggagaagtagcgtagtttggattttagttttcgttggtttttttttattttgaaagagaatgggaagttttggtttttaagatttaaagatttaggggttttgcggagttcgaggggttttggcggttttaaatatttaggcgatcggagggttaagttttttatttttgttttttttttttttcggtaaattttgcgttagaggttagttttagtttcgtcgtttggtttagtatttttttttgtagttcggtttcgcgaatttttacgttcgtttgcgggttattcgggttgcgggtttattttttcgttggtgaaaaatgtatttcggtggaatgggaatatttgggaagggcgcgtataaattttatacgtttttttttacgttatttttataatatattaggattttatttatgatcgagtatattatcggatttttatttttttattattattttagttgataaagttggggtttagggtttttttcgtgtttttttttttttttcgttgggtttcggagttttttttcgttcgagaggagttcggaaggcgggaaggggaatcgttgtcgggggttagttaggtcgttatttttcgttagtcgcgggttgttcggttttttgtttttttcggcggcgtttatgtttagttttcggacgggagagcgtttttttttagttttttcgtttgttttttttttttttatatttttttcgtttttttcgtcgtcgttttcgtttttttcgtcgtcgttttcgtcggtcgttcggattgtcgggttgttgcggtcgtcgcggttcgtttcggtgtagtcggtcggttttttggtttcgcgtagcggttcgttttttagtatttttcggtacgtgatcgtttttttttttttttttattttttggttaaaagatttggagacgaacgtcgtaagtttttttatcgtcgtcgtacgttagttcggcgtttaatttttgttagtagagtttcgtttttttttttttttttttttttttattgttttagtttttttaataataatatattaatgggataggaggtgggg

SEQ ID NO: 22 - DNA, 5473 bp, Artificial Sequence
  chemically treated genomic DNA (Homo sapiens)
ttttattttttgttttattgatgtgttattattgggggggttggagtagtaaaaaaagaagaaggaaaaaaagagcggggttttgttggtagaggttgagcgtcgggttgacgtgcggcggcgatggaagaatttacggcgttcgtttttaagttttttgattagaaagtgaaggagaagaaggaggcgattacgtatcgggaggtgttggagagcgggtcgttgcgcggggttaaggagtcgatcggttgtatcgaggcgggtcgcgacgatcgtagtagttcggtagttcgggcggtcggcggaggcggcggcggaggaggcggaggcggcggcggaggaggcggaggaggtgtaggaggaggaggagtaggcggaggagttggaggagggcgttttttcgttcgggagttggatatgggcgtcgtcgagagaagtagggagtcgggtagttcgcgattgacggagggtaacgatttgattgattttcggtagcggttttttttttcgtttttcggatttttttcgggcgggagaggatttcgaggtttagcggggaggggagagggatacggagagggttttggattttagttttgttagttagagtgatagtggaagggtgggggttcggtggtatgttcggttatgggtggggttttagtgtgttgtgggggtggcgtggggggaagcgtgtggggtttgtgcgcgttttttttagatgtttttattttatcgaaatgtattttttattagcgggaggatgggttcgtagttcggatggttcgtaggcggacgtggaagttcgcggggtcgggttgtaggagggggtgttgaattagacggcgggattaaagttagtttttagcgtagagtttgtcgggagggagaaggggtagaggtggaaagtttaatttttcggtcgtttaggtgtttggggtcgttaagatttttcgaatttcgtagagtttttgaatttttggattttaggggttaaaattttttatttttttttaaggtagaaggaagttaacgaaagttgaggtttaggttacgttgtttttttcgggcgaggcgtttcggttttttggtgtgttgggggcggggggggggggcggcgggggaggtggggatttatatttatataatttttttagtgtttttaattatttagtattcggtttttttagagtaaaaattttttggtgttagtttagtgttaggaaacgtttttattttaatggtagagcgttttatattaatttaaaggagtttaataataaaattgatttggtatttggtgtttgtagtaattggtgtattgttatatttttttaattaagaaaatatgtggtatgcgtggaattatatatttaagtaagtaattaagttgtttatgatacggtttgtttttgtttagattagtaattggaaatttggggataaaaatagagattttattaagtttatggattaatttgaaatttggatattttttcgaagttttaaaattttgagtggtatttattgtgtagatgatatgtaatagataaagtttttttattttattggtagaatttgaagggtgtgtttttatatttaaattttaatataatattagtaaaaatattttgttattaaattggtttataatgtttattataatgtttttttttaaagaaaggataaatgtttataaaattaattttgagaattagaaaatacggtaatatttaagattatcgtagttagaatgttcggtagggtcgagatttagcgatttttttttttttaaattagtattaggtttttttaaatttgtaaagtggtggagttatcgttaaggtgtttagtgtagtttttcggttatgagtttataattataggttcgaattataggttcgttagcgcgtttgacggcgaggtttaggtttgaattttcggcgggcgtagtttttgggattgttgatttttaagtttagggtaagtattaatttttttgtagatcggttttttcggaaatgatttttaatatttatgttggtttggattttgcgttgggaagaattgtaaatagtttcgattatttaaatttagttttgattttttaaaattcggagtttttgattcgggcgtagaggataaaggttttagggggatatatatatggtggttgtatatgtttatattagaagagtttttgtttttaaagggaggagaaggataggaaagtggtaacggatgtgtgtaaatttagagtagaaaaatttatattttattaaatattcgagttgttggttgtatgaaaaggttttgagtaattaatagaaatcgaggatcgcgaatatttcgtttgaatttgttgatttttgtgggttaagcgtttagggtcgagtttgcgtttttacgagggagggcgaagagagaatagaaagagcggttgttttcgttcgttatcggaggttggtttttcgttttttgttttttggttcggtttgggcggcgagttttttgggtagttaatatggcgtgggcgtttgtgttcgtgcgatttcggtcgggtaggcgggacggagattatttggttgtttaggggattttatgtagggtttggttcgagtttaggggtagcgaggggcgtttgcggatgcggttttttgtgcggtataatatcggggtttgttgttttcgttgatatttttcggtttaattgtttttaaattagattagtaagtttgcggtaggtagagagttagcggtggtgagagttggtttgagaacgagttagttttttgggaatggtcggtgtgagaggttagtgggtggttttgtcgcgtttttatgtttagattttgttttgtgagaggtttggcgttgcgtttttgatttttgtgagtgttgcggagtaagtgagtgcgaaagtgagtggaaattatttggtgtttgttggggaaggtcggtgattggggggtgaatagtgaggcggtgagtcgaggtacgtttgtgaaggaggtggtggatgattgtttattttgttttaggcggtcgtttagatttgatttttgcgttttttcgggatatttttttttcgggtgggttgagaagtcggattaggattttacgagggggaaggattttttatttttttttgcgataaatttggtaataggatttgttgtgttgttttcgttcgtgtgtgtgtgcgtgtgtgtgtgtgttcgtgtggatgtacgtgtggtttcgttggggtgttttttttagtgttttcggagttgaaagatcgtaaagaggatgcgaaagggatggaggacgaaggttagattaaaattaagtagaggcgaagtcggattaattttattttggaataatttaatgagttggagaggttttttgacgagatttattatttcgacgtttttatgcgagaggaattgagttagcgattgggtttgtcggaggttcgagtgtaggtatttagttgttaggaggtcgagggtttagggagtagagagagtttggggttggaaagaggtttgggggatatattcgggaggtggtgtttttagtgtttggtgtaagatgagaaggaaagagatatttttattagaggttttattttttaaagtagattttagttttatagtatttttttttttttttttttttttattttaatatatgtttttagaagaagaaagttgtgttgggtttttttttagagtttttataaattatattttttttgtttcgtattggttttaatgtggtttaattttaatgggtttatttttataaggtttaaaaaaaaattttatagaaaacgttttatttttggatgttttaaaagttttaaagagtattttgttttttggagttggatttttttgaaagtttgttttgtagggtttaggtttgttaagcggatattttaattaggtttatagatgtgtagattataaagaaaattagtaattgttaagtgtagaaatttatagtttgttgttagcggtcgattttaaattgtgtgtgaaatagcggagaaataaacgtattttggttattttttgtttatttatttaattaaggtaacgaaattgattttaaatatattagattttaaaataaattatatatattagtatttatatttttaaagtttgttttttagtacgtgttatatttaatgaagttaggattgaaatagattttttttattggttgtggaggtaaatgtaatagtaaaaataggttttgggggtatttaaaggagtaaattgtgtatatttatatatatatatttttttagttttagggggaataaatttaaatgttttagattgtattttcgtttagataataaaatagaataaaatgatagttattattggtttgaatatatggagtagttttaggttcgtatatttgtagttgttataaagtatcgttgtaatagatattttttcggtttttgggtatagagattattatttgtagcgaattatgtataatttttaaggggtttttttatattttgtaataggattaggaaaaaaaaaaatagagtagttacgttgaagaggaaaagtaataataggttgttttggttattatagtattagtagtagagtttttttttttaagttttttttgtttcgttttgtgtattgagatttttagaggtttagtaattttttaaaaatatgatgataattattatagttatgattattagtattttaattttaatttttttaggggaaaaaaaggtaagaagttttaggttatgtgaattatataaaggatgttattttggtataaaatttattttttgttgtattaaatagtagagaaatttttgaagatttatattgattatgatatttgtttttaaaaatatattaatgaaagttttgaagtagtatttttattttaatggggttttaaaaattttaatttgtgagttaattaatatgttttattattgaaagtggaatataaaagtaagttttatttgaattttaaaaaatttgttatattgtttgtaaaagttgttaagtttaagtaggtaatatttaggagaataaagtatttaagagttatttgttttatatatattttatttttttttcgttgagtgttttttttttttttttttaagaagtgaattttattgttgttttatatttttatttatattttagttattttttagatgtttttttattattttaattgtaaatagtggttttttttaaagaagtaaattagattattatgataatggtgtataattattttgttattgtgttttattttgttgtatagtagaatagagaaattttaaatttttttgtagtgaggtttttatgatattaattatttttttttaatttttataatttttttttcgtaaaggagttattatttgttttggtgtttggtttttttttaagatgaagttaattaatattat

SEQ ID NO: 23 - DNA, 5328 bp, Artificial Sequence
  chemically treated genomic DNA (Homo sapiens)
ttgataagagaaaaggtgttgagggtaggtcgcgttgttttatttatagtttattgtttgttgtagagtttttgttaggattggaaagttaatttagtgttgattaaaagtattatagagttaaaggattggtaatgattgttaattttattttagttttatgtatttttaattgttgtaattaaagatacgttatttaaatataggtgaagggttttttttttttaagttgggttgggggggggtgggtgggtggattataattttatttagattttttattttatttgggtgttatgtagttttaaattagattttattattattattatttagagtcgttttttgttatttatatttggttttgtagaatcggaagtgtgaaatgtgttatttatataaaagtttttgtttaaagaaagggtgggacgggggagtgtagaggagtaattatttaggggtgatttaaatatttaggtttttttttttttttttttaaattaatagaaaggttttcgatatagttaaaagtatttgaaattgggggtaaggttaataggttaaagggattagtgttagttttttaagtatttttaaaaagattatgtgaatagatggaaaaatatatttttaattaaataattttttttatattatagttgtagtgttggtttagaaatcgtgtaattttttattcgataggagtttttttatgagaatattaaaggataaaaagttttgtattttcgtagttggttaaaattgataattatttttttatgcgcgcgcgcgtatatatatatatatatatatatatatatatatattaatatatatatatatatatatatatatatatatatatatatatatttttaaaaaagaatttagtttttaatttttttttatttacgaagattaaagttttgtattcgatttcgcgagcggttttcgtttttcggggttggaattcgatttagatgtgaagcggtattgagtcgttgcgtaggttcgtgtttagcgttttttgttggatatagtaggagttgcgtagcgttagttttagaaatcgttggaattttgttttggggttagagaaaatttttttattgttttttaaaaaagaaacgggatgcgaaaataaatttttatatttttgaaaaataatataatattaatttaataaaaaattaaagaggcgatattataattttaatttaataaaaaataaagattgttttttttatattttagttattttttattcggtttggttttgtaatttttttgaaaggttttgcgatggtaaaataggtaaagaaaagtgacgaaaaataaagtatttttttgtagtcgtggagaattaagtaaagtatatttttttcgttttgtttatattttaaaaaattaaacggaagatgttgttgtttgttgttttgacgttgttagtagcgttttgaatgtttttagaggttttgtaagtatcgtaattgagttttcgagtaaacgaaataatttgtttttatgtgtttatttttagagtataattaaaagattagttttttttttgagtgttttttattttttagattaattttggttaaagttttttttttttagatattggttaagaaatatatattggttaagaaataggtgtttggtatttttttttttttattttagtcgtaggatttcggggaaggtgtgttaatggtagggaaggttttttttgaaatttagtatttcgttgattaggaatttaaattattttagggaagggggagtatttttatatttttaaaaaattatttgtttatataataaagagttttgttttttttattattattattttttttttttttttttggttagtaagtgagggtaaaagtagtttttgaattattttagaaagagaaattgtaaaaatggtatattttttgaatttaaaataatagggaaatgtgggtttgtttaattgtttaaaattaaatagaaataattattgtgttaaatgaataagatgttttaagatttatatttttagggttatggttattgattttaattttatttttaagaagtttagagatcgcgtttttaaagtttgtttattgacggaaatcggtttaattttttataaaagaatggttttttaaaatattgaatattatggttatgtaaggtttatgatatttttatgtttattttttttattttttaaaattagcgaattcgagataatattttaaggggaattgttatttagtgcgatgagagatgatttttttatttggttttagaattagatttcggtttaggttttttagtaagtaggtttagatgtaatggaaggagagaagaattaagttttttgataaaatttttatttcgaattttatggaaaagataggtaagcgggattttagttatagtatttttattttttgttttattaaaaggtttgtttttattatagaaataatatagtcggtgttagttttgtgaattcgcgttaatcgataaggtaagaaacggtgcgttgatagtcgaggttcgaaggttgtttagtggttttcgtagttcgtggggtagggaggttaaagttagtaaaatgttggaggcgacgttagaaagagagtatatgtttgttattcggaagtgatgtcgaacgtgtaatagtagagttttggagatttttatttcgtttcgtatttagggattttagtttgtggggtagtaggttgttgggtgaaggtaggagggagaagtcgtatttggttgagggcgggtgggcgtgtcgggagcgagtgtttaattttttagggtttatggagaaagtataatttttagttgaggaaagagagttaaataagtgggtggtttaggtttgggaatgttatttagttttttcgacgtagtgttatttttgtggttttagggggttttagtatttgttcgaattttattttttaaggtcgttagtaggaaggtagtttttttatttttgagggttgaggagggggtagcgagtgatttgattttttagtagtagggaaaatcgtagcggttggtaacgggtcgcgttttttcgcggcggtaaagcgttttttaggggcggggcgggtatttttggttttttgttttagcgtttaggtttgagttcgcgcgggttggttgggcgttttgttttgtaagtaattaattttgttggattttgaggattatttaggcggatgggtttatttagtttaggtttattgagattttgttaattttttagattttttttttttttattttttatattttttatgatgaatttaggaaagaattcgaattttgaaaaatagtatatgtggtttgaagtttgatagttatttgggtgtgagggatatgattttattaataaagattaagatttaaggttgagtttttatttattaaatttgtttttttattttgtttttaaattttggagattttttagtttcgttgttttaattttgatatagataaaggcgttagggagaaagtttaggcgggtttgaagtagttgaggtatagattgatatttatttttttattatttagacgggtagataagtattgttagattgggggttttaatttagggtttagcggttacgtgggttgttgcggggtgttgaaattataagtataatttgatattattgagtttacggtgtttgttaataatttgtgaattaggtgtagagattgttattgtagattataatagtttttgaaggatttattatagtttatcgtgttaatgatttttaaattaaggaggggaggtggggcgagacgaaaaaggagtggggagagttagtaaaaagggaagaagggtgggagggaagataaaagttagagttttagtttcgaaggagtttttaaagattattaggttagcgatttgagaattttattgggatgggtttggaaatttaattttatttgagttaggattggaagaggggcgttgggggtaagtagaagtgggtttttgggaaggtcgattttttaggtattttttttgaggtcggaatagtttttgggagagggttttagatgttaatgggaggttttgaggatgttagttcgtttaggatgggtgtatattttgatttagagtattttttagggtaagtcgtagttgtagatttttgaaaaaagtggtaatagtttcgtttagggatgatggtgattgtaggatgattttttttttttaatggtttgttttaatttttttttatgttataggtgaaagttttttttttttttttttgatagtatttttgtttgttttttatatgttacgtagatttaatttttttttttaatttgtttttttgggtgttaaatatattagttttttgagattttattatttttgtggtttgtattgagtttaattgtaattttggaaagggaatttgtggataatatagtagtagtatgttttataagattttagaagaaagaagattaaattttatttatgcggtgtggtaggggttaggttaagggaaagaggttttttttgtttggtaaattgtttttgtagtgaaagggtagtttagtttttattggagtgttatttaatattggttagagaaaggttaaggaaagtgtaggtttgttttttttataaaagttgtggttataattaaacgaagtaattatagttggagaatttaaaataattgttttttttttaaaatgagggtaataattttagttattggaaaattgggattttaaggaaaatttttttttttggtataattaattgtataagatagtgtggttaattagagatatatgtatttagatttaagtaatgatttataggtgtaaaaggtttagtggttttttgggttatttggagtttttattgattattttgttttttaaaaaatttttttttaattttaaaaataaaagttatagatttaatgtaattgaaaattattgatggtagttttttaggtttttagtttatgtttttaaagggaatttatatttaaaataattaaattatttaatggttatattatatttttttttggataatagttgtagtgtagggatagaattttaatttatattaaaattgtttgataatttagaaatggaaatgaaattgtgaattaatttttttagaaaatatttgagttagaatataagaaggatgtttatatataatattgtaagtaatatgatgattattatatgtagtttgaaagatttatataaatgattatatattatttttgttgttataatttaaagtaaggg

SEQ ID NO: 24 - DNA, 5328 bp, Artificial Sequence
  chemically treated genomic DNA (Homo sapiens)
tttttattttaaattatagtaatagaagtagtatataattatttgtgtaggttttttaagttgtatataataattattatgttatttatagtattatatatgaatattttttttatattttagtttaaatattttttggagaaattaatttataattttatttttatttttgaattattaagtaattttaatgtaagttaagattttatttttgtattatagttgttgtttaggagaaaatgtagtgtgattattaaatgatttaattattttaaatataaattttttttaaaaatataaattgaaaatttgaagagttgttattagtggtttttagttgtattaaatttatgatttttatttttaaaattagaagaaaattttttaaaaggtaaaatgattagtaggaattttaggtagtttaaaaagttattggattttttatatttgtaaattattgtttgagtttaaatatatatgtttttgattgattatattattttatgtaattaattatattaaaggaaaaggttttttttagaattttaattttttagtggttagggttattatttttattttagagaaaaaatagttgttttaaattttttaattgtgattatttcgtttagttgtgattataatttttgtgggaaaaataaatttatattttttttaatttttttttagttagtattaaatgatattttagtgaaggttgggttatttttttattgtaaggataatttattaagtagggaaaattttttttttttagtttggtttttgttatatcgtataaatggaatttagtttttttttttttggaattttatggaatatattgttattgtgttatttataagttttttttttagaattatagttggatttaatataaattataaaagtgataaaattttagagggttgatgtgtttggtatttaaaaaaataagttggggaaagaaattagatttacgtaatatgtgagggatagataggaatattattagaggaaaaggaagaaagtttttatttgtggtatgaaaagaagttaaagtaaattattggaaaaaaaaagttattttataattattattatttttaaacgaaattattattattttttttaaagatttgtagttgcggtttgttttggaaagtgttttaaattaaagtgtatatttattttgggcgggttggtatttttaaggttttttattgatatttagaatttttttttaaaagttatttcggttttaaaagaaatgtttgagaagtcggtttttttaggggtttatttttgtttgtttttagcgttttttttttagttttggtttagatggagttgggtttttaaatttattttaatggaatttttagatcgttggtttgataatttttaaaggttttttcggagttggggttttgatttttatttttttttttattttttttttttttttgttggttttttttatttttttttcgtttcgttttattttttttttttaatttgaagattattgatacgataggttgtaatgagttttttagaaattgttatgatttatagtgataatttttgtatttaatttatagattattgataagtatcgtgggtttaatggtgttaagttgtatttgtggttttaatatttcgtagtaatttacgtagtcgttgggttttggattaggatttttagtttggtagtgtttatttgttcgtttgagtgatggagagatgagtattagtttatattttaattgttttaagttcgtttgggttttttttttggcgtttttgtttgtgttagggttggagtaacgaaattgaaagatttttagagtttgaaaatagagtgaaagagtaaatttaataaatgagagtttagttttgaattttagtttttattaatagagttatgttttttatatttaaataattattaaattttaaattatatgtattgttttttagagttcgggtttttttttgggtttattatgaaaggtgtgagggatgaaggggaaaagggtttgaggagttggtagggttttagtgggtttaagttaagtgggtttattcgtttggatagtttttagaatttagtaagattggttatttataaagtagggcgtttagttaattcgcgcgggtttaggtttggacgttgggataggagattaaaaatgttcgtttcgtttttaaagggcgttttgtcgtcgcggagaaacgcggttcgttgttagtcgttgcggttttttttgttattaaggaattaagttattcgttgttttttttttagtttttaaagatggaggggttgtttttttgttggcggttttggggagtgggattcgggtaggtgttggggttttttgggattatagaaataatattgcgtcgggagagttgggtggtatttttaggtttgggttatttatttgtttagttttttttttttaattaggggttatgttttttttatgggttttagaaagttgggtattcgttttcggtacgtttattcgtttttagttaggtgcggttttttttttttgtttttatttaataatttgttattttataggttgggatttttgggtgcggaacggggtggaaatttttaggattttgttattgtacgttcgatattattttcgaatagtaggtatatattttttttttggcgtcgtttttaatattttgttggttttggtttttttattttacgggttgcgggaattattgagtagttttcggatttcggttgttagcgtatcgttttttattttatcggttggcgcgggtttataaaattagtatcgattatattatttttgtaatggggataagttttttggtagagtaaaaggtgggggtgttgtggttggaatttcgtttgtttgttttttttatagaattcggggtagagattttattaaaaggtttgatttttttttttttttattgtatttgaatttatttattaaaaaatttaagtcgagatttaattttggaattagatggagaagttattttttatcgtattaaatagtaattttttttgaaatgttatttcgaattcgttaattttgggaggtgggaagaataaatataaaggtattataaattttgtatagttatagtatttaatattttaaaaagttatttttttatgaaaaattaagtcgattttcgttaataagtaaattttaaaaacgcgatttttaaattttttaagggtaaagttaaaattaataattataattttgaagatgtaaattttaaaatattttgtttatttagtatagtaattatttttatttgattttaaataattaagtaaatttatatttttttattgttttaaatttagaggatgtgttatttttatagtttttttttttgaaataatttaaaggttatttttgtttttatttgttgattaaaaagaagaagaagaaataataataataaaaaaggtaaagttttttattatgtagataggtagttttttggaagtgtaaaaatatttttttttttttaggataatttggatttttggttaacgaaatgttgaattttaaagaaaattttttttattattggtatatttttttcgaaattttacggttaagatgaaagaaaaaagatattaggtatttgttttttagttagtatgtgttttttagttagtatttgggaaggaaaaattttgattaggattggtttaggggatgggaaatatttaaagaagagattggttttttaattatattttggaaataaatatataaaagtaagttatttcgtttattcgaaggtttagttacgatatttgtaggatttttgagggtatttaagacgttgttgataacgttaaaatagtaagtagtagtatttttcgtttaattttttgaaatgtggataaaacggaggaagtatattttgtttgattttttacggttatagaaaaatgttttgtttttcgttatttttttttatttgttttattatcgtagaattttttaaaagagttataaaattaaatcgggtgggggatggttgggatgtgaggaggatagtttttattttttattgaattaaaattgtagtatcgtttttttagttttttattgagttaatattatattattttttaaggatataaaaatttgttttcgtatttcgttttttttttggagggtaataaaagagttttttttaattttagagtaggattttagcgatttttgggattggcgttgcgtagtttttattgtgtttaatagggggcgttgggtacgaatttgcgtagcggtttagtgtcgttttatatttgagtcgggttttagtttcggaaggcgagagtcgttcgcggggtcgagtatagagttttagttttcgtggataaaaagagattaaaggttaaatttttttttggggatatgtgtgtgtgtgtgtgtgtgtgtgtgtgtgtgtgtgtgtgttggtgtgtgtgtgtgtatatgtgtgtatgtgtgtgtgcgcgcgcgcgtatgggggggtggttattaattttaattaattacgaaaatgtagagttttttattttttgatgtttttataaagaaatttttatcggatgagaaattatacggtttttgagttaatattgtagttatagtgtgggggaaattatttaattaaaaatatatttttttatttgtttatatgatttttttagaagtatttaaaaagttgatattgatttttttggtttgttaattttgtttttagttttaaatatttttaattatatcgaaggtttttttattaatttgaaggagaaaaaaaggagatttaaatatttaaattatttttaaatagttatttttttgtattttttcgttttattttttttttaaataggggtttttatgtgagtgatatattttatattttcgattttgtaaagttaggtataaatgataaggagcggttttaaataataataataataaaatttaatttgggattatataatatttaagtagagtagaagatttaaataaaattgtaatttatttatttatttttttttaatttaatttaaaaaaaaaaaattttttatttgtatttaaatagcgtgtttttaattatagtagttggggatgtatgaggttgaaatgaaattagtagttattattagttttttaattttgtggtgtttttgattagtattaaattagttttttagttttaataaagattttatagtaagtagtgggttgtaaataagatagcgcgatttgtttttaatatttttttttttgttaa

SEQ ID NO: 25 - DNA, 4324 bp, Artificial Sequence
  chemically treated genomic DNA (Homo sapiens)
gttttttagtattattattttaaaggtatttttattttttttattattagggaaggagtgtgtagttttgatttagttttttagtggagtaaagggaatttagaggaagggggatttttgtagaaattgttagttatataagtaagttttttttggtttttcgttttattaaaagtgaaaaattgtttataggagtgtttatgttttttgtttttttatgtattattagagttaagaggggatttcgttagtaaggtattttttgttttgtttcgtagattatagttttcgatttttattttattgtttgtgtaatgtgtagaattggagtttaaagtagcgggtttaggattattttttaggttcggcgggtttatagattttttttttggttgggaagaggggttttcgtgaaagtagagtttgataagttttagtattgttatggttaagattattaatattattattgttgtgtttataaatatgaagattacggtagaggaggagtcgaaagtttgaggagtggtagaggaagtcgtagaattaaatttggaaattacgttttttgatggggtgatagtggtttttgattcggtttgaagggatatttgaagggtagatatcgtgttttgtgatttttatcgaggaattttaggaatagatgttattgaattgttttgtttagggataagtggtgttttttttagtttttcgtcgattttgattggttatgttttttgcggtacggggttggttgtagtggtcggcgggcgtttggtgggtatttcggtttttttaagggtcggttgtttttttttattggttatataagagcggtcgtttttttttagttcgaagttcgtagtatattcgtaggtaaagttttttaagtcgtttaggtagttagggagttttgcgtatttgttagtacggaggtatttttcggggtagggatataatatatcgttcgagagtttgttttagcgagcgtcgatttcgttcgcgatgtaagtaattgagatcgggagttgttttcggtagagcgtatttatttcggttttaggtggattgaagtttagagcggcgttgtgtagttggaagggcgcgcgatagtttaagttagaggcggtttcggggcgcggcgtaggatataagattttaaattggtatttgtataggtagtcgttggcgcgtaggtggtatcgtatttttttttagtttgcgggttcgattttatcggtggtttggagtatcgcgtattttcgcgcggtgtaggagcgttggggtttttttatttattgtagcgtgtcgttttcgagatcgtcggggtcggaggatagttaggagaaatttcgtaaaggttcgttttttagggtgtagtgggaacgtttgcgttttagtgcgatttagaatagtaggtttttggagtttttttcgggttttgggtttgttcgtaggagcgcgagtatagcgcgtagttcggcgttcgtacgtacggtgttgagcgttttatttcgtaggatgtaggttttttcggtcgtttgtcgttttatggtagcgtggtgtaggttgtagtaggttttcgaggtcgagtagttagtacggtcggtagtggggtgttcgtcgtcgttcggttcgggttagagcgtttgttagaggaggtatagggcgaacgtcggttttattttttgaggtttcgtacgtagagttgtttttaatttggatttgtttcgttcgaggacgtagagttgtgtttggagcgcggttatcgttttttatagttggtttttttaattcggtttttttttttttttttttcgttttcgttttcgacggattttttaattgttaagaattttttcgcgggtttagcggttaatagttttttttaggtcgcgataggaaatgtgtgcggagcgttgttaggttcggtgtagttttgagttattttggggttaggaatatagttggcgtcgggtataggggacgtagtcgattagaaggttaaatattttgtttagagtaagaggagaaattcgttattgggatgaagtgtgtggttttttttcgtttagggagttttattaggatcgtagaatttataatacgtaagcgaatataggtaggaaggatttgagaaaggaattggtttatgattataagattacgttcgtttattgtgtttttgttcggagttgtggagttagcgttagaataattcgtagacggttttagtgtttggggggtttgtgtttgtgggggaaaaatatgttgtgaaataatttagtaattgtttttgttattagaggtagtattatttaatcgtatatttttttatgggtttttgtttttttattatgttaagagattttaggagttttaattattaaagaatttggagttgtttgggtattttaaatgggaaattttgttttttttattagtatttgttttagaaatttattttttatttttacgtgtttttttttgagttagattatattgatttattatagaaaggaaatgtatttttaggattaaatgaaaaataatgattatagattttaatagttaggttgttagttttttttgttattgtattggtttaaaaattttttaagtttataggttatatataaatgagttcgtggttttataaatattcgagaataattgttttatgtgtgattttagttttgaattattttagtattatttttttttatgattgagtggtagtatttataatagtaagttgtaaatattttttttaaggaaaattagagttttttaagaaattaaaatgtttattttattataatgaatattgtatattgttaaaaaatattttgtaatttgaaagatgggtgagttaatttttttagaattttagtgggtgttttgttttaatataaatattttaatttagtgggaagtggtaaggaattaaagatgaataaagaagtaaaggttaaaaattgtattgttatgaaaggattttttgttagtaatttagataatttagtattagtttagaaaacgtatattttattttggtttataatggttaaatacgttgttattagaaatatatagagagttttagttaagtttttttagagatgtttgatgtttttaaatatttttaattagaatgaaagttgttattttatggataatgtatataagtttattttgttttattgtatttaggttgatgaggggtgggagggaaggttttaggattatatttgtatgtttttattttatttttattataatttttatttttttttttttttggaaattttatgtattttaataaataatagtaagtttatgagttattattatatttattttgtttttgttgagtatggagttttgtattaggattttttttttgttttattttttaatttaaagaatattttttagttttttttttagatgtttgagaattattttaaacgtggttttgcgtttaaattaggtaatttagtgttttataagaaagaaatatgaaaatttagaaattaaattgaatggtttttaaaaaatatttagttatttgggttagttttttatagattattgtaattttatgattgtgtttgtaaatgtgtttatgtagtgtaatatttttaataaaattttttttaaatttaagtagttaatggaaattttttagatagttttaaaaatcgtttgggatgagatgaggtgtttatagtaagaaagaatgaatagttggaaagtttaagtaaatatatgattttattttttgatattttgtttaggggagtgggattatagtagagaatatattggttataacgattatatgagagtattgattatgattatgattatattatggaatgatataagagttagaaaaaattagtttaaagtaggacgtaaatagttttgtaattagtttgaaatagatagtttatttgattaaattagaaatggaggaaagtttttattttttaataatatttattaagataataatatagaattattttatttttattggattttaaatgtttaaaaattttataatattaaatgtgaatttattggtttttttatatgttatagattagagtaattattttggaaaaatttgatatttttttttattaaaattgaatatttgtaaattttagtatttttatgataaggtataaaattaagagaaatttttgtatatgtataatagaagatatgtaaaaaatgtttatagtgatattatttatattaataaaacgttgaattaattaaaatatttaaaaatagtataaaaataaat

SEQ ID NO: 26 - DNA, 4324 bp, Artificial Sequence
  chemically treated genomic DNA (Homo sapiens)
gtttatttttatattgtttttggatattttgattgatttaacgttttgttaatatgaatagtgttattataaatattttttatatattttttgttgtatatgtgtaaaaattttttttagttttatattttattatggaagtgttagagtttgtaaatatttaattttagtgaaaaaaagtgttaaatttttttaaagtggttgttttaatttgtaatatgtaaaagagttaatagatttatatttggtattataagatttttaggtatttggaatttagtgggggtaaaatggttttatattattattttaataaatattattaaaaaatagaaatttttttttatttttaatttggttagataaattgtttattttaaattaattataaaattatttacgttttattttgagttaattttttttaatttttgtgttattttatgatatggttatggttatggttagtatttttatatagtcgttatggttaatgtgttttttgttataattttatttttttagatagaatgttagggagtgagattatgtatttatttaagttttttagttatttatttttttttattgtagatattttattttattttaaacgatttttaaagttatttaagaaatttttattgattatttaagtttgaaaaagattttattaaaaatattgtattatatggatatatttataaatatagttataagattgtaatggtttatagagagttggtttaagtgattaagtattttttaaaaattatttaatttgatttttggatttttatgttttttttttataagatattaagttatttaatttaaacgtaaagttacgtttaaggtgatttttagatatttgaaggaaggattaaggaatgttttttaaattgggaaatagggtaggagagaaattttagtgtaaagttttatatttagtaaaagtaaggtaagtatgatgatgatttataggtttattgttgtttgttaagatatatggaatttttaggaggaaagaagaatgagagttatggtaaaaataagatggaagtatatagatgtgattttgaaatttttttttttattttttattaatttgaatgtagtaaaataaagtgagtttatatgtattatttatggaatggtaatttttattttgattaaagatatttaaaagtattagatatttttaagagggtttagttgaaattttttatgtatttttgatggtaacgtatttggttattatgaattaagatagaatgtacgttttttaaattgatattgaattgtttaagttgttaataagaaatttttttataatagtatagtttttaatttttatttttttatttatttttaattttttgttattttttattgagttgaaatgtttatattaaaataaaatatttattggaattttaaagaaattggtttatttattttttaaattataagatattttttgatagtatataatatttattataatggaataaatattttaattttttaaggaattttaattttttttaaaggagatgtttataatttattattataaatgttgttatttaattataggagaaaatgatattaaaatagtttaaggttaaaattatatatagggtagttgttttcgaatatttataaggttacgaatttatttatgtataatttataaatttgaagaatttttgaattaatatagtggtaaggaaagttaataatttaattgttaagatttatggttattattttttatttagttttagaaatatattttttttttgtaatgaattaatatggtttaatttaaagagaaatacgtggaagtgaaaaataaatttttaaagtaagtgttgatggaagaagtagaattttttatttaaaatatttaaataattttaaattttttagtagttaggatttttgaaattttttgatataatagagaagtaaagatttatagagagatatgcggttaaatagtgttgtttttggtggtaaaagtagttgttaagttgttttataatatattttttttttataggtataggttttttaaatattggagtcgtttacgaattattttgacgttaattttatagtttcggatagaaatataatagacgggcgtggttttataattataagttagttttttttttaagttttttttgtttatgttcgtttacgtgttatgggttttgcggttttgatgaaattttttgaacggagaaaaattatatattttattttagtggcgaatttttttttttgttttaagtagggtgtttgattttttagtcgattgcgttttttgtattcggcgttagttgtgtttttgattttagaataatttagggttgtatcgggtttggtagcgtttcgtatatattttttgtcgcggtttaagggaaattgttggtcgttgggttcgcggggggatttttggtagttggggggttcgtcgggagcgagggcggaggggaagggagggggaatcgggttggggaagttagttgtagagggcggtgatcgcgttttagatatagttttgcgttttcgagcgggatagatttaagttgggagtagttttgcgtgcggggttttagagaatgaggtcggcgttcgttttgtgttttttttggtaggcgttttggttcgggtcgggcggcggcgaatattttattgtcgatcgtgttggttgttcggtttcgggggtttgttatagtttgtattacgttattatgaagcggtaggcggtcgaggaggtttgtattttgcgaggtggggcgtttagtatcgtgcgtgcgggcgtcgagttgcgcgttgtgttcgcgtttttgcgggtaggtttagggttcggagggggttttaaagatttgttgttttgggtcgtattggagcgtaggcgtttttattgtattttggagaacgagtttttgcggggttttttttggttgtttttcgatttcggcggtttcgaaagcgatacgttgtagtgggtggaggagttttaacgtttttgtatcgcgcggagatgcgcggtattttaggttatcggtggggtcgagttcgtaggttggaaggagatgcgatgttatttgcgcgttaacggttatttgtgtaagtattagtttgaggttttgtgttttgcgtcgcgtttcggggtcgtttttaatttgagttatcgcgcgtttttttagttgtatagcgtcgttttggattttagtttatttgggatcgaggtgagtgcgttttgtcggggatagttttcgattttagttatttgtatcgcggacgaaatcggcgttcgttgggataaattttcgggcgatgtgttgtgtttttgtttcgggaggtattttcgtgttggtaaatgcgtagagttttttaattgtttagacgatttgggaggttttgtttgcgaatgtgttacgggtttcgagttggggaaggacggtcgtttttgtgtgattagtggggaaggatagtcgatttttggggggatcggggtgtttattaggcgttcgtcggttattgtaattagtttcgtgtcgtagagaatatggttaattagggtcgacgagaagttgggagagatattatttgtttttgaataagataatttagtaatatttatttttgagatttttcgatggggattatagagtacgatgtttattttttaaatgtttttttaagtcgagttaaaggttattattattttattagggagcgtgatttttaagtttaattttacgattttttttgttattttttaggttttcgattttttttttgtcgtggtttttatatttgtgagtatagtagtagtagtgttggtgattttgattatgatagtattggggtttgttaagttttgtttttacgaaagtttttttttttagttaaggaaggagtttatgggttcgtcgggtttggagagtgattttgagttcgttgttttgggttttagttttgtatattgtataaataatggggtgaaagtcggggattgtgatttgcgggatagagtagagggtgttttgttggcggagtttttttttggttttagtgatgtatagggaaataggggatatgggtatttttgtgaatagttttttatttttgatgaaacggggaattaagaggaatttatttgtgtaattgataatttttgtagaaatttttttttttttaaattttttttattttattgaggagttaaattagaattgtatattttttttttgatgatagaggaagtggaagtgtttttaggatggtgatattgggggat

SEQ ID NO: 27 - DNA, 5683 bp, Artificial Sequence
  chemically treated genomic DNA (Homo sapiens)
ataatgttaaatgtaaattttttgttttgtttaatgtttttattttatggttggtaaataaaaataataaaatagtattgataataataatagaaataattaattgaagttgtagtttttaatttttttaaagataataggttaaagtgaggtttttataataagatgttagttattaggaaggaagttagggaaaatttttttttagggggtaattgatttttattggtttaatattgtatgtagtattgagttaggaggttttatggagaagtgtttgtttttttttttttgttgttagaataaagtttataaataattttgttttttttatatttttggagttagttagttagggtttttatttatgtttaggggattagatttggatatttgtaaaagaattgaatatagatggatagttaagaaaaaaataaatgttaagattattattatttatagtttaatgatttagtaatttaaaaaaatttaagaataataaaataatttttaagaaggataagaattttaaaatatgtagtttagaaaattaaattttttaggtttagagtttaagtaaaagaaaatttgagataatgaagtttggaatattgggtttgtattttgtttttgattttgtgtttttgggtaagatattgaatttttttattttagatttattttatattttaaggagggtgtaggattttgtagtttttttagtgatggtatattattaattagaattttaattagttttatttttattattttagtaaaatgatgttaaaaattagatttcgtgatatgagagaagaggggaaattaattatagattataaagaaattgtgggatttaagtttagggtgaggtgttttattgaatttttagggttggttatagtatttgttatatagtaggtatttaataaatgatgtgtaatgggtggttagattgatggaaaggtaggtttttttagtgacggtaaaggatttggggtaaaagagatttgtggttgagttttgatttttatatattagtatattgattagacgaagttataagttttaatttttttttgtgtaaaatggagataatattttatagggttatgaggattaaataagaaaatgtttagtttagtgtttaatatataggaagtatatcgtaaatattagttattattattattaatattgtgattatattttttatttaaagatttttttgaggagtagggggtatttagagataaaaagtttgtaggtgggaaatttgttagttttttagggcgttaggtttttgtggaattttgtattttttttttgttttagtttttaagaatagaaattttttagggatttttggtgaggtagtcgtgggaagatgaggtgtagaagtaagttgggatttgtgagttttaatttcggttttttttgcgttgagatttaagcggattttgtttggtttgtatgcgttattgggggaaatggacgtgggtttgagcgcggtaggtgcgagggcgttgtttcggggtcgattattttgcggggatattgtagttgttatttttttttttgtaggcgggtaggggaagcggtggttaaagtgggagtcgatcgtttagtatagtttgtttgagtgttgattaggaaagtttaggttttttttaaatttcgtcgttagatttggtgacgtattcgtatgtatttaaggcgtttgtacgtagaacgttattatagaatgtagttattttttttaacggttcgggaaattagaggtttttttagttatttagggtagaggaattttttttatttttatgtgatattttttgatttagaagaattaatgttagattttttttgggtttttttatttatagttatagttttttttttgtttagttaaaattgaggtaggtaggaaaatattattgggggtataagtttattagtgtgtaaacgtatttttatgaagtgtgtttttagggagttattaaaaattgattttttaattatagaaatagatgagattttgagaatattgagaagttgttttttgtaaagtaaatttgtaatggtttttgacgaaggggggtcgggggcggggagaagtttagtcgagagaggagtttattttacgttatatttttgtagttgaaaagttgtttaattatcgttaatcgtttttcgtataagagttttgggaagattttagaaataaggtaaatgaagattttttattgtttttttcgggttgtcgttttcggaagtcgaagttttagtacgtagagtagtaggagagggttatttttaggtaattttattgagtaaaataaattatttaatggtataacgttttggtttaaaaaattggaatttattagaggtaaaaatattttttaagaaattatggatatttcgcgttttatttatttttatggtagtagagtatttgtattttgagttatttatatagatttatgtttcgtatcgtttttattttttttttttttgaagtaaagtttttttttaagaaggcggttagaaagtggattttatcgggggaaaaagaaaaatgaaacgtaaattagtttggtattgtttgcgttttttaaaacgcggtgggataaggttattgagtttatagttaatttttttatgtatataaaatgtatatatatgtatatatttttatatatataaaagaatttatatatatgtatatagttatgtggagttttgaagtaattttttatgtttttgttttttttaagttttttaggtggaggtagttataagtattataagtcgttttagtgattattagggacggaaatcgttaattattacgtttttttttatttttaggggttttttggttcgtgatataagaggtttcggtattggcgtttttttagaattggtttagaggagttagtttagagtgtgaggtcgggtttgtattgaacgtatatatcgaggtttattagattttttcgattttagcgaagggtgttgattgttgtgttgttagaggttagtaagttttttgtgcgtagttgatgagttttagtaattcgttatttgggcgtttttttttaaattttgggagtaaattgggaaaataaaaaaatttttacgtttattggttttttttttttttttaattttttttttcgattcgtttgtgggagtttttttttttttgttgggattataatgtgatgcgtaatcgtttgtgaatgaataaaagttatcggtaagtagggagacggggatagatcgttgacggtagattgagggtggtagtaaaggttcggtttttaaggataatggggagtcgtttttttttacgtttggtttttatggtttttttcgttttttaggtaaaatgaatgtttttttatttattattcgtagagtatttttaggcgtgcgtagaatttgttgatgaaatttattagcgtcgattgggtagttttgtggagttattcgaggttttttattgtggtttttgtttgtagaatttaagtatttatataatgtattagtacggaatttagtattcggtggggatatcgcgtgttaagtttggcgcggttaacgttttagcggtttttttattcggtagttttttaggattattttcgaggaggtattggagtcgggttgtaggcgtacgggtaaagaatttagtattttatttaagtatttcgttttttttggtcgttttcgggaggttatgtttaaaaatataaaaataaaaataaaaataaaaataaagggaggcggataaagtttcggtgggtgaattgaagttgggtttatgtgattttgaagtcggagaaataaatttaatatgaattttgtttttttggcgggcgttgggatttcgtcgttttttatgttaatcgttggaagtttcgtatttaacggttataggtgtttaggagcgtagagaggtttcgggtttaaattatcggcgcgtagggattggattcgcgggtagcgatttttttaattttttttttttcgttttatatatatattttcgcgtcggttgaaagtatggaggatttagggtatttgaaaaaagaggggttgggcgcggtggtttacgtttgtaattttagcggtttgggaggtttagaagggcggattatttgaggttaggagttcgagattagtttggttaatattagtttggttaatatggtgagatttcgtgtttattaaaaatataaaaattagttaggcgtggtgtttgtaatattagttatttgggaggttgaggtacgagaatcgtttgaatttgggaggcggaggttgtagtgagtttagatcgcgttatcgtttttttgttttgggtgatagagtaaggtattgttttaaaataaaataaaataaaacgaaagattcggttaggaaagaatttgtaggtattcgaggcgttcgtattttgtaaagtaaatgtaatttttttattaagtcgaagttttttatatttatttttttagaggaaggtggtttaatttagaaattttttttaagaggattttttatcgaagattatcgcgaagtgttaggaattcgttttagtttcgataggtgtaggatttttcgtgtcgttatattttgggattttatttttttaaataggttatttaaaagttagtagtgtaatcgggatttcgcggcgataaagaattattgtgtagaattttggagttgggagtcggttcgttttttttttaaagaaatcgggatttcgcgtttttttcgtcgttagcgtagcgcgttagcggcgtttaattagtgagtttttcgggtttgtgacggttttcggtttcgttttttcgacggttataaaaagtcgtagcgaagtttgtattttcgagtatcgcgcgcggttttgttttcggtacggtttttaggtgcgtttttttttcggttgtttgtagtattggttttattgttttcgtcgttagttatcggttttttattcgttttattttttattgtggtttggttgagtcggtcgttaggtttcgttgtttttttttgtttttttttttttttagcggtcgtattttgcgtcgtattttatttggtttgtaggtgagtagtagcgtagtatttttgttcggcgagtttaatttgtttagttcggtttttgtcggagtggtatcggtatttttttaagacgtttttttttttgtaggatgaagaattttatgttggaggtggtgtttttattattggagaagttgttttttatttttaattttacgttttttagttcgggcgtcgcgggcgaagataaagggaggaatagtttttatgaaattagttttttttatcgaggcgacgtgttggaggtgtttcggatttatttgatttattatggtatttatttaggagataatcgtgttgtttatatgatgttcgatattttgttggttttgatagacgatatggggcgtacgtagaaggtggtttttaataagcgttttattttgggcgttattgttaaagtggttagtattcgcgtggatatagtggaggatttcgtttacggagttaatattttggttaattatttggacgagtttttttagaaaaaggtattgtttaacgaggaggtggcgcggagggttgaaaagttgttgggttttat

SEQ ID NO: 28 - DNA, 5683 bp, Artificial Sequence
  chemically treated genomic DNA (Homo sapiens)
gtaaagtttagtagttttttagtttttcgcgttattttttcgttgagtagtgtttttttttggagggattcgtttaggtgattgattaggatgttagtttcgtaggcgaagttttttattgtgtttacgcggatgttggttattttgataataacgtttaggatgagacgtttgttggagattattttttgcgtgcgttttatgtcgtttgttagggttaataggatgtcgggtattatgtgggtaatacggttgttttttaggtagatgttatagtgggttaggtgggttcggggtatttttagtacgtcgtttcggtggaaagagttggttttataaaaattgtttttttttttgttttcgttcgcggcgttcgaattaaagagcgtgaagttggagatgaggagtagtttttttagtagtaaagatattatttttagtatggggttttttattttgtagggaagagggcgttttggagaggtgtcggtgttatttcggtaggggtcgggttgggtaagttaagttcgtcgggtaggggtgttgcgttgttgtttatttgtaggttaggtgaggtacggcgtaaagtacggtcgttgaggagagaggaaggtaaaggaggatagcgaggtttggcgatcggtttagttaagttataatggggaatgagacggataaggaatcggtggttgacggcggggatagtgagattagtgttataagtagtcggagaaggagcgtatttgggggtcgtgtcgggggtagggtcgcgcgcggtgttcggaggtgtaggtttcgttgcgattttttatggtcgtcgagggggcggagtcgaaggtcgttatagattcggaaagtttattgattgggcgtcgttggcgcgttgcgttagcggcggggaggacgcgggatttcggtttttttgggaggggggcgggtcgatttttagttttagggttttgtatagtgattttttatcgtcgcgggatttcggttgtattattggtttttaagtggtttatttagggaggtagagttttaaggtgtggcggtacgaaaggttttgtatttgtcgggattggggcgagtttttggtatttcgcggtagttttcggtggaaagtttttttgggagagatttttgagttggattatttttttttaaaaggatagatatgagggatttcggtttaataaagagattgtatttattttgtaaagtgcgagcgtttcgaatgtttgtagatttttttttgatcgaatttttcgttttgttttgttttgttttgagatagtgttttgttttattatttagagtaggagggcggtggcgcgatttgggtttattgtaattttcgttttttaggtttaagcgattttcgtgttttagttttttaagtagttgatattataggtattacgtttggttaatttttgtatttttagtagatacggggttttattatgttggttaggttggtgttggttaggttggtttcgaatttttgattttaagtgattcgtttttttggattttttaaatcgttgggattataggcgtgagttatcgcgtttagtttttttttttttaaatgttttgaattttttatgtttttagtcggcgcgagggtgtgtgtgtagggcgggggggggggggttgggggggtcgttattcgcgagtttagtttttgcgcgtcggtgatttgaattcgaggtttttttgcgtttttaggtatttgtggtcgttgagtacgaagtttttaacggttggtatgaaaaacggcggggttttaacgttcgttaggaaagtaagatttatgttaagtttattttttcggttttagggttatatggatttagttttagtttatttatcgaaattttgttcgtttttttttatttttatttttatttttatttttatgtttttaagtataatttttcggagacggttaaggaaggcgaagtatttggatgagatgttaagttttttgttcgtgcgtttgtagttcgattttaatgttttttcgagggtggttttagggagttgtcgggtgagggagtcgttgaagcgttggtcgcgttaggtttggtacgcgatgtttttatcgggtgttgagtttcgtgttaatgtattatgtaaatgtttaaattttgtagataaaggttataatggagagtttcgggtggttttataaagttgtttagtcggcgttaataggttttattagtagattttacgtacgtttgagggtattttgcggatgatggatgaaggaatatttattttatttggaagacgaagggggttatagagattaggcgtgagggaaaacggttttttattatttttggaggtcgggtttttgttgttatttttaatttgtcgttagcgatttgttttcgtttttttgtttgtcggtgatttttgtttatttataaacgattgcgtattatattatagttttagtaaagaggagaaaatttttataaacgagtcgaaagaggaagttggagaaggggagagagttagtggacgtggagatttttttatttttttagtttatttttaaaatttaaagaaaagcgtttaggtggcgagttgttgaaatttattagttgcgtatagggagtttgttagtttttagtagtatagtagttagtatttttcgttaaaatcgggggagtttgatagatttcggtgtgtacgtttaatgtagattcgattttatattttgaattggtttttttgggttagttttgggaaagcgttaatatcgaagttttttgtgttacgggttaaagggtttttggagatgaaaggaaacgtgataattaacggttttcgtttttggtggttattaaggcggtttataatgtttatgattgtttttatttggggaatttgagggagataaaagtatggagaattgttttagggttttatatagttatatatatatatatgaatttttttatgtatataaaaatatatatatatgtatatattttatatatatgaaagaattagttatagatttaatagttttgttttatcgcgttttggaagacgtaagtagtgttaagttgatttgcgttttatttttttttttttttcggtggggtttattttttggtcgtttttttgggaaagggttttattttaaaaagaaaggaggtgagagcgatacgaggtatgaatttgtataggtggtttaagatgtagatattttgttgttatggaaatgaatagggcgcggagtgtttatagttttttgaaggatatttttgtttttgataaattttaattttttaagttagaacgttatgttattaagtgatttattttgtttagtggaattgtttgaaagtaatttttttttgttgttttgcgtgttaggatttcggttttcggaagcgatagttcgaaggaggtagtgaaaagtttttatttgttttgtttttgaagtttttttagaatttttatgcgggaagcggttagcgatgattaggtagttttttaattgtaaaaatatagcgtggaatgagtttttttttcggttggattttttttcgttttcgattttttttcgttaaggattattgtaaatttattttgtaaaaggtagttttttaatgtttttaaaattttatttatttttgtggttgagaggttagtttttaatggttttttggaggtatattttataaaaatacgtttatatattaataggtttatgtttttaataatatttttttatttgttttaattttagttaaataaagggaagattatagttgtaggtggaaaggtttaagagaaatttaatattagtttttttaaattagaagatgttatatggagataggagaaatttttttattttgagtagttggagagatttttggtttttcggatcgttaagaaaggtggttatattttgtgataacgttttgcgtgtaaacgttttaaatatatgcgaatgcgttattaggtttggcggcgagatttagaaagagtttggatttttttggttaatatttagatagattgtgttgagcggtcgatttttattttggttatcgttttttttattcgtttgtagaagaaggaatgatagttatagtgttttcgtagggtggtcggtttcggggtagcgttttcgtatttgtcgcgtttaggtttacgtttattttttttagtaacgtatataggttaagtaagattcgtttgggttttagcgtagaagaggtcgaaattgaggtttataggttttagtttatttttgtattttatttttttacggttattttattagaggtttttggagagtttttgtttttaagaattaggatagggaagaggtgtagagttttatagaaatttaacgttttagaaggttaatagattttttatttgtaggttttttatttttggatgttttttgttttttagagaagtttttggatggaagatatgattatagtattagtaataataataattaatatttacggtgtgttttttgtgtattaggtattgaattaagtatttttttatttaatttttataattttatgaggtattatttttattttatataggaagaaattgaagtttataatttcgtttagttagtgtgttaatgtgtggggattaggatttaattataggttttttttgttttaggttttttatcgttattgggaaggtttgtttttttattagtttaattatttattatatattatttattgaatatttgttatatggtaggtgttatgattaattttagaggtttaataaaatattttattttaaatttagattttataatttttttgtaatttgtaattaattttttttttttttttatgttacgaggtttaatttttaatattattttattgggatagtgagaatagagttggttaaggttttgattaatagtatgttattattaggaaggttataaaattttatattttttttagggtgtaggatgaatttggggtggggaagtttaatgttttatttaagggtatagagttaggagtagaatgtaggtttagtgttttagattttattattttagatttttttttatttgagttttaggtttgagaaatttggttttttaaattgtatgttttaaaatttttgttttttttagggattattttgttgtttttggatttttttagattattaaattattgggttataaataatgataattttaatatttgttttttttttagttatttatttatatttagtttttttataaatgtttaggtttggttttttggatataaataggggttttaattagttaattttaaaggtgtggggaaaataaagttgtttgtgaattttgttttgatagtagaggaaaagaagtagatatttttttatggagttttttaatttagtgttatatgtagtgttaggttaatagggattaattattttttgggaggagattttttttggttttttttttggtgattagtattttattatgaggattttattttagtttattgtttttagaaagattaaaagttgtagttttagttggttgtttttgttgttgttgttaatgttgttttgttgtttttgtttgttaattataaaataagaatattgaataaaataaagaatttatatttagtattat

SEQ ID NO: 29 - DNA, 2347 bp, Artificial Sequence
  chemically treated genomic DNA (Homo sapiens)
ttgaggtttaagttagggaggtcgagattgtagtgagttttaattgcgttattgtattttagtttgggttatagagtaagattttgtttaaaaaataataagaaaggtggaggaaataggtagagattagaggaaagttatggtttttttttgattattttgagatttttttaattttattaatttttggagagttttttatttgttttattttatagattgggaaattgagtttaggggtatttagattatttgaggttttagttggagatgaagagatggatttaaattattttttgtggagtatagttttgttttttttagagtggagatcgtgttttagggttttttttattcgtattaaggttggtttttttaggttttattttttttatttgtaaaatgggtttttgtgagtatgaaggagggtttggtttgtagtgagcgttgtttattcgttggttagtgtgattagttattgttgttgttttttagtggtttttgtttggtagttgttggaaaaatatcgagggagggagatatagggttggggaggtgaaaagttggatatagacgtttttagttttttgggattaggaatagatggaggtcgggtgttttgaagtggagtagggaggattgtttggaggagggatatttgagttagaatgtatagaattatagggtattttcggtagaggttatagtagaggtaaaagtttagaggaggtgttttggggattattaagatggatatagtgggtttgggtttttgtggggtgatgggttggggtttcgagcgttaggttaaagggtttggtttttttcgagggcggtagggagttatggtaggtgtgtgagttggaggggtattttagataaaggtgaagtggtatttttttttttattgaagttataatttgatattttttttgaagttttttatattttattttttttttgttatattttggtaagtttattttttttttttcgtttttaggtttgttaagaggttttgtgggttttttatggttttatttagttgttttagaagttcgtttgagataagtttttagggttgttttatttttaggtgttttatagattcgggggcgggtgaagtaggaaggatcgagttacgagggttttagaaaatatgacgggaggaattatagtatttttttatttttttagttttcgtttttttagggagagagatttttagttcgaggaggagggtcgagtttttttttatgtggtaagagattttaacgtcgttgaggattatttaaagagggtgttgaaggatgtataggagttagttaggagataatttatttgttaatttaataaatttataggtattatttattaataagaataatttttattatttaattaggattttttaatgtttttgagggattatttgaggatgtttaattattatttttatttgagatagggttttattttgttatttaggttggagtgtagtgatataattatagtttattgtagttttaattttttagttttaagttatttttttattttagtttttgatatagttgagatataggttaatgttattatgatgtttggttttttttttttttttttttttttttatttttgagatagagttttgtttagttatttaggttggagtgtagtggtgcgattttagtttattataattttcgttttttgagtttaagtaatttttttgttttagttttttgagtagttgggattatagatatgtattattatatttagttaatttttgtatttgtagtagagatggggttttattatgttgtttaggttggttttaaatgtttgattttaagtgatttgttggtttcggttttttaaagggttgggattatcggcgtaagttatcgtttttcgattatttagtttttttttttttttttttagtttttggtagaaatgtggttttatgtttgtattttagtattttgggaaggtcgaggtgggtagattatttgaggttaggaattcgagattagtttgattaatatggagaaatttcgtttttattaaaaatataaaattagtcgggtatggtggtttttgtttgtaattttagttatttgggaggttgaggtaagagaattatttgaatttggtaagcggggtttgcggtgagttaagatcgtgttattgtattttagtttgggtaataagagtgaaattttgttttaaaaaaataaaataaaataaaaatataaaattagttaggtatggtggtacgcgtttgtaattttagttatttaggaggttgaggtaggagaatcgtttgaatttggtaggt

SEQ ID NO: 30 - DNA, 2347 bp, Artificial Sequence
  chemically treated genomic DNA (Homo sapiens)
gtttattaggtttaagcgatttttttgttttagttttttgagtagttaggattataggcgcgtgttattatgtttggttaattttgtatttttattttattttatttttttgagatagaattttatttttgttgtttaggttggagtgtaatggtacgattttggtttatcgtaaatttcgtttattaggtttaagtgatttttttgttttagttttttaagtagttgggattatagataggagttattatgttcggttaattttgtatttttagtagagacggggtttttttatgttggttaggttagtttcgaatttttgattttaagtgatttgtttatttcggtttttttaaagtgttgggatataggtatgagattatatttttattaaaaattgaaaaaaaaaaaaaaaaagttggatggtcgaggggcggtggtttacgtcggtaattttagttttttgggaggtcgaggttagtagattatttaaggttaggtatttgagattagtttggataatatggtgaaattttatttttattataaatataaaaattagttgggtgtggtggtgtatgtttgtaattttagttatttaggaggttgaggtaggagaattgtttaaatttaggaggcggaggttatagtgagttgaaatcgtattattgtattttagtttgggtgattgagtaagattttgttttaaaagtaaaaaaaaaaaaaaaaaaaagaaaagttaggtattatggtggtattggtttgtgttttagttatattagaggttgaggtagaaggatagtttgaaattgggaggttgaggttgtagtgagttatgattgtgttattgtattttagtttgggtaatagagtgagattttgttttaaataaaaataataattaaatatttttaaatgattttttagaggtattagaaagttttgattgaatgatgaaaattgtttttgttgatgagtgatgtttatgagtttgttaaattaataaatgggttgttttttggttaatttttatgtattttttaatattttttttagatgatttttagcgacgttagggttttttgttatatggagggaagttcggttttttttttcgggttgaaggtttttttttttgagaaggcggaagttgaggaggtggggaagtgttgtggtttttttcgttatgttttttggggttttcgtgattcgattttttttgttttattcgttttcgagtttgtggggtatttgaaagtggggtagttttgggaatttattttagacgagtttttggggtagttgggtggggttataaggggtttatagggttttttggtaggtttagagacggagggaaggaggtgggtttgttaagatgtggtaaggggaaggtgggatgtggggaattttagagggagtgttaggttgtgattttaataaggggagaaatattattttatttttgtttggggtatttttttagtttatatatttgttatggttttttatcgttttcggagaaagttaggttttttagtttggcgttcgaggttttagtttattattttatagaaatttagatttattgtgtttattttggtggtttttaaagtattttttttggatttttgtttttgttgtggtttttgtcggagatgttttgtaattttatatattttagtttaagtgttttttttttaggtagttttttttgttttattttagggtattcggtttttatttgtttttgattttaaggggttaggggcgtttgtgtttagttttttatttttttagttttgtatttttttttttcgatgtttttttagtagttgttaggtagaggttattggggaataataataatgattaattatattggttagcgggtggatagcgtttattgtaagttaagtttttttttatatttataaaagtttattttgtaggtgggaaagatgaggtttgagagggttaattttggtgcgggtgggggaagttttgaggtacggtttttattttggaaggggtaaaattatattttataaggggtggtttgaatttatttttttatttttagttggggttttaggtggtttgagtgtttttggatttagttttttaatttgtgaaataaggtaagtgagggattttttaggaattggtggagttgggagggttttaggatggttaggagggggttatgatttttttttgatttttatttattttttttattttttttgttattttttgagtagggttttgttttgtggtttaggttggagtgtagtggcgtaattagagtttattgtagtttcgatttttttggtttaagttttag

SEQ ID NO: 31 - DNA, 6709 bp, Artificial Sequence
  chemically treated genomic DNA (Homo sapiens)
atttttaaattttttaatttatagagggttggagagttggtattatgagtttttagtttttacgggtgagaaaagaggtgtttgtgtggagggtaggtgcgatttcgggggttagtagagaggagaggttgcgggaggattcgttgcgaagggcgaggggtggcgttgggtgggacgggcgtttggggtcgtgtagggtggtttttgggtgttgttcgggttgtttgtcgtttagtattggcgtaggaagacgggttcgcgtagcgtttggtaatagtggtttgttttacgtttggaggcgattaagttttgagttaaaggcgtcgggtttagtcgggaagtgtatggcgatttagaatacggagcggagaaggttttaggggatacgaggttatcgttttagttttcgggtttgcgtttcgagcggttagggtgcgtacggatgggtttcgggatgttagtggagaggtgataggagtttattattttacggttaagcgtgtgaggttttcggcgggcgggggtttttttcggggtagggtagggggagagttaggtatgtttttaacgggttttttagtagaatcgttaggaaagtggtttttaattttaggtatttttgtggtttttaggtagttgggcgattaaaaatttatttttgtttgttgtgaaatgggataggtggttgttaggttagagattgtgtttacgaagtttcgtttggcgggtcgggattgacgtggattcgggtttttttcggaagtttgggaatttgtgagttttttagtttttcgttttattttgtttgtttgaaaaaaggagttgtttgagaggaagagttaaggtttaaaaggttttaaacgaagagtatgcggtttgacgcggagcgtaaagaagcgagtagtgaattgaatttggtgggattgagattagaggcgtttgtatgcggcggtcgtttcgcgttttattaaagtaatttgttatttacgataattatttttgtaattattttggagtggttgtgatttgatgtttgtggtgttttagggtatgtttttattggatatagatattttagggtgttttttgacgttagtgtcggtttagtgggtgttagtgtcgcgaagggagggtggcgggcgtgaatgttttttttttttgggtttgtcgtaggtttcggtttttttattttgtttgattttggcgggtttgttatttattgaggtttttatcggcgtttacgttgtttcgagaggcgggataaacgttcggcgcgtggcgcggagtttgcgaaagcgttcgggggtttttattttttgttcgggagttttttttttggggcgggaagaggagtcgtagatttgttcgaattttgttttattcgtttggtcgttttttttcgtttggggtgggggtaggggtggcggatgatttaggtttggggtcgggagttttgtttttaaaggtattatttcgcgtttttttggaagtggcgcgttgttggggcgttttcgttgttgtagaggtttggtttgcggttttataggggcgtgggtttagggtttttagggagtaagtgagtttaggttttttagggggcggtagaggggaattttcgataattttttatttttttttttaggcggttgcgaggttttcggggttttagaggggtttttttttgtcggtgtcggttgttttgagcgcggttacgtagttcgcgtttttacgtgggtaaggggcggggacgttggagggaggttgttttggatgttggagttttcggttttcggttttgttgagtagaaaagttgaagttaaggaagggttgaggtttttttataagggcgcgcgcgtgtttgggtgtcggtttagaagtcgagaatgtgcgtattggggaagggtttttcgtgtcgagaagatagaggatttgttttagttgtttttcgtatagagggcgcggaggttgcgttttagttcgaacgtttatttattggaaagagggtagcgtcggggtttagggaagttttttgggaatgaatggtttttgttaagcggtttcggattttttgggttttttgggtttacggtacggtgttgcgcgagtttttagtgtttatcggtttttttcgttttttgcgtagacgtttttaggcggggaggtatatcggttttttcgggtagttttggttagtgttgttgtgggaaaggagagttagggtttgggatgggggatgagtatttttttgtttatttcgggttttagcgtgtaggaggtaaatttgttagtatagataagatagtttgtttaagttgtattttaggtcgggttagagaataaaatcgagggttagaaggtttagaatgtcggatagtttagcggtattcgttagggagttttaggcgttcgaaagaggcgtcgtatttttggcgagtttaggatttatttttttggatttgtgttttggagtgtttgcgggtttgggtttaatttttgtttttggtaggtgtttttttttttcgtcgttaatattaggagcgttgtttttgcggtaatttattttatttttagaagtttgttttgggatcgaagtgttagggttttgtgtgtttttttatgtattgttttttttagtgtaaagttttgtagatatgtttggtcgaaaagttttagtggttttaatttttagattttgttttcgcgttcggtcggaaaattatttgggatttggttgttgtttaaggtcgggggaaagttttttttggaggacgtttattattattatttttttttaggtttatttgggtttaaataaatgttaaagtttaaacgaattcgagaaggaatagcgaggtagtggatgtcgttatttcgtggatgggagagttatgtttattgtaggtgcggatatcgtattgataggtattgattattgtaaaatcgtatttagtattaaatagaaatagttttgttttttaatttttatagaatgtttaaatttagtttagggagttagttggggcgttttaataaatacgttttcgagaattagcgatgttttttttataatgaaagttaattgttgtataataattgggttaaagaatttcgttagtttaaattttaaaaattagtattgtattttgtttttaagtttgggtggtaagtatcgaaggggagagggaagtagcgtttgtgtggaaggaagtttcgttttttgtttaaatatgtgggatttgggtgtttatttttttagtcgagagttttttgtaggtttttttttaattttttgtatttttttatttttattttattcgtggcgttcgggttttatttttgttcggcgttttttttttagggcgagtagaggtttttgagtgatcggttcgttagaggtagttgtagagtcggcgtttcgtagggtagggtagggtcgggtcgttgggttggtttagtgcgcgcgggttttttttggttttagttagtcgcgggagatgttatttcgggcgatagcggcgagacgtcgttgttcgtaatttttgggcgggtaggatcgtttgttgtttttgcggtttttggggtagattttttaggagttttttttttttttttttcgttcgggggtcgggatcgcgttgtgtttacggagggaattgggcgtttttggcgtattggggttttagttgtatgattttagtttagattttaagttttagtggggtgtaggtgggatgggatgtgtttttaggagatgaggagatttcggttgttgagtcgttttttaaatgcgtagttttttaattttaggtgatattcgttttttggaggaacgagtgaaggtcgtttaggcgaaagaggggtgggttttagtatttggatttttttttttagttttgttaattttaggtgtgtttacggtggaggtgatagaaggaaggcgcgtcgggggatttaggtttcgtaggttttcggttgttaacgaggtatcgtttattgatttcgcgtttcgttttttatagcgtggggttcggcgttgcgttaggttcgggtgcggggcggagttaggttgggattggttgggggtcgtttcgttcggcgtttgggttttcgcgtcggttttcggggaggagttatgataattttttttttattaaggcgttcgggtttttcggttatcgttaggatatattgttcgggcgcggtttttttcgttcgcggagcggttttgatattcgcggcggtagtatttacgttcgtagagtcgtcgatgcgtgtttagtgattcggatagtaaggttcgcgcgcggcgggggcggcggtagacgtttggttatcgtgatttcgattttggatttatcgtttgggggttggggggattttggatttaattggcgattgttttgggggacgtcggacgttatgttgtggaaaataatcgataatgttaagtacgaagaggattgcgaggtgagttggggtttcggggtgtagtttcgtttcgtcgaggatagttcgggaggtaggggttattggatcgaggtcggggacgagggtataggagttttggtttttcggtgggacgggatttattttttcggatattttttagtttatttttgcggggttttttttttgtatagggtttttttttaaatagttttttttcgggaacgaggtttggaaagagaatggtaaattttatttatatagtttatcgggcgtttttttaagcggtaaatagttttgtttttcgttttttcggaaaagtgtttcgtttgtaatttttagacgtggtttttacgtacgaagtttttgtttaaaggggttagatgaggttatttgttagcgatattttggcggatatttttttaaggtcggtttgttatttgtttcgttattttttcggggaagtacgaaaataatcgaagtttggtttttaaaagaagtgggggttggggagtggtggtgggggtgttcgaggttagatggggtcgtaagagttcgcgagtgttttagtttgtcggataggttgagttagagtttcggagagtgggagggaagaaggaggcggcgagcgggaagaggaagaagacgtaggtagcgttaggcgagtttaggggcgtcgggagcgcggagttcgggttacggattcgcgggagtttattgcgttttcgggttttggagggttgtttttgttcgtaggttcgggcgttttcgttaggaggcgatagcgttatgtttttttaggttttcggcgtttcgagatttttgggtagatggggacgtattttttagaaattgagtcgggtcgtttaggggcgagggaacgtgcgcgggtaaggttgtttaatttttagggttttttatgttttttttgcgtttcgacgtgcgagaatattgtttttggtagtgtagggcgtttttatttattatttttttcggttgggttcggttagtagggagggtcgttttgtgcgcgcgttttttttttattttttagggcggcgtagggtggcgggttttgtttttcgagcgtcgttcgttcggaggtttttgtttcgagggcgtggaagggagggtttcgggggcgggggaggtgcgtatttttcgcgtcgcgtattttattcgcgtttgtcgcgttgttatttttagtagtttttgcgttatgggcgggttttacgagatagttttgtatcgggcgttcggttttttcgtttcgggttttggttttttcgtttcgggtttcggttacggatttttttggtttaagatttagggttcggatttggcgtttttaagcgtttcgggtttgggagtagcgtttagattttcgtcgtcgggttttgagaattcgtttttttaggttttttattagattttttttttttttcgtattttttgtttataacgaaattttcggggcgtattgttttcgggtatttttcgattttgggtaagtttcgtcgggcggggtgcggttggtttttcggggttttttgcgtagttcggcgatgtcggttagttcgtagtagcggggtttcgtattaacggggttttttgtttttttttttttttttaggatcgttacgacgggagtagtaatgggaattcgcgggttttttatttttttttcgtcgggtagtatttttatagtttcgcgttattttttttttatattggagtcgtcgaatattagtcgttattttattttttttttttttattagtagttggtttatttttagtcggtcgatttttattcgtatttgggggaagcgtacgtcgtcgttattaattttttgtattagtcggcgtttataggtagttagtagtaggtttggttcggtcgttagagttaggagggagcggggttgttttcgtattacgggcgttcggtcggtttattgttttattttttcgggttggaggcgggcgcggtgagcgttcgtagggatgtttatcgtcgtttcgatttgttgttgttttacgtatacgttttggatgtcgcgggtttggtcgagaatttggggttttacgatatgttttattagatggacgaggtgtaggtgagcggcgttgcggtttttgatcggatttgtttattttacggttttttgtttttatttcgtatttttttaggttttttcgaatttaagggaattttgtttttttttttttagaatgtcgacgattagtatttgttgttgta

SEQ ID NO: 32 - DNA, 6709 bp, Artificial Sequence
  chemically treated genomic DNA (Homo sapiens)
tgtagtaataggtgttggtcgtcgatattttgggggagagaggataaaatttttttaagttcgggggagtttagaggagtgcggggtgggggtagaaggtcgtagggtgaataggttcggttaggagtcgtagcgtcgtttatttgtatttcgtttatttggtgaggtatgtcgtggagttttaggttttcggttaggttcgcggtatttagggcgtgtgcgtggggtagtagtaggtcggagcggcggtaggtatttttgcgggcgtttatcgcgttcgtttttagttcggagaggtggggtagtaggtcggtcgggcgttcgtggtgcgagggtagtttcgtttttttttggttttggcggtcgggttaggtttgttgttggttgtttgtgggcgtcggttggtgtagggggttgatggcggcggcgtacgttttttttagatgcgagtaggggtcggtcgattgggagtaggttagttgttggtagggagggggaaagtagggtggcggttgatattcggcgattttagtgtgggagaggggtggcgcggggttgtagaggtgttgttcggcggaggagaggtgggggattcgcggatttttattgttgttttcgtcgtggcgattttggagggaaaaaaaaaaataggagatttcgttagtgcgaaatttcgttattgcgaattggtcggtatcgtcgggttacgtagagggtttcgggggattaatcgtatttcgttcggcggggtttgtttagggtcggaaggtattcgggggtaatgcgtttcgaggatttcgttgtaagtaaagagtgcggggagggaggagagtttggtgaaagatttgggggaacgagtttttaaagttcggcggcgaaggtttaggcgttgtttttaagttcgaggcgtttggaggcgttaagttcgaattttgggttttgggttagaaaagttcgtggtcggagttcggggcgaaggagttagagttcggggcgaaggagtcggacgttcggtgtagagttatttcgtggagttcgtttatgacgtagggattgttggaggtggtagcgcggtaggcgcggatagagtgcgcggcgcgggaaatgcgtatttttttcgttttcgggatttttttttttacgttttcgggataaagattttcgagcgggcggcgttcggaaagtagggttcgttattttgcgtcgttttgggaagtgaagagggagcgcgcgtatagggcggttttttttgttggtcgggtttagtcgaggggagtaataagtgggggcgttttgtattgttaagggtagtgttttcgtacgtcggggcgtagagggggtatgaagaattttggaaattgggtagttttgttcgcgtacgttttttcgtttttgggcggttcgatttagtttttaaaggatgcgtttttatttgtttaggggtttcggggcgtcgggaatttggaggaatatggcgttgtcgttttttggcggaagcgttcgggtttgcgggtaggggtagttttttagggttcggaggcgtagtgaattttcgcgagttcgtagttcgagtttcgcgttttcggcgtttttgagttcgtttagcgttgtttgcgtttttttttttttttcgttcgtcgtttttttttttttttttatttttcgaaattttagtttaatttgttcgataggttggagtattcgcgagtttttacggttttatttggtttcgggtatttttattattattttttagtttttattttttttgaaagttaaatttcggttgttttcgtgttttttcgaggaggtagcggggtaggtgataagtcggttttggaggagtgttcgttaaggtgtcgttagtaggtagttttatttgatttttttggatagagatttcgtgcgtaaaagttacgtttgagggttgtagacggggtattttttcgagaaaacgggaagtagggttgtttgtcgtttaggaaagcgttcggtaagttgtgtgggtgggatttgttattttttttttaggtttcgttttcgaggggaggttatttaggaaaaggttttatataggaaaggggtttcgtagaaatggattaaggggtgttcggagaagtggatttcgttttatcgagaggttagggtttttatgttttcgttttcgatttcggtttagtggtttttgtttttcggattgttttcggcggggcggggttgtatttcggagttttagtttatttcgtagtttttttcgtatttgatattatcggttattttttataatatggcgttcggcgttttttaaaatagtcgttagttaaatttaggatttttttagtttttaagcggtaaatttaaaatcggggttacggtgattaggcgtttgtcgtcgttttcgtcgcgcgcgggttttgttgttcgggttattggatacgtatcggcggttttgcgagcgtagatgttgtcgtcgcgagtgttaagatcgtttcgcggacggggaaagtcgcgttcgaatagtgtgttttggcgatagtcgggggattcgagcgttttaatgagaaggaaattattataattttttttcgggggtcggcgcggaggtttaggcgtcgggcggggcggtttttagttagttttagtttagtttcgtttcgtattcgggtttggcgtagcgtcgagttttacgttgtgagggacgaagcgcggagttagtgggcggtgtttcgttgatagtcgaagatttgcgaggtttgggtttttcgacgcgttttttttttgttatttttatcgtaaatatatttgagattggtagagttgggggaagggatttaaatattgaaatttatttttttttcgtttaaacggtttttattcgtttttttaaaagacggatgttatttggagttaagaaattgcgtatttggggagcgatttaataatcggggtttttttattttttaaaaatatattttattttatttatattttattgaggtttaaggtttgagttgggattatgtagttggagttttagtgcgttagagacgtttagtttttttcgtgggtatagcgcggtttcggttttcgggcgggaggagagaggaagggatttttggggagtttgttttaagggtcgtagaggtagtagacggttttattcgtttaggagttgcggatagcggcgtttcgtcgttgtcgttcgaagtggtatttttcgcggttggttgaggttagggggaattcgcgcgtattggattagtttagcggttcggttttgttttgttttgcggaacgtcggttttgtagttgtttttggcgggtcggttatttagaagtttttattcgttttgggaaagaagcgtcgggtaggaataaaattcgagcgttacgggtaaggtgagggtgaggaggtgtaggaagttgggagagagtttgtagagagttttcgattggagaggtagatatttaggttttatatgtttagatagaaaacgaaatttttttttatataaacgttgtttttttttttttttcggtatttgttatttaaatttgaaagtaaagtgtaatattaatttttaaaatttaaattaacgaaattttttggtttagttattatgtagtaattgatttttattgtaaggggaatatcgttaattttcgagggcgtatttgttgggacgttttaattggttttttgggttggatttaaatattttgtggggattagaggataagattatttttatttgatattgaatacgattttgtaataattaatgtttattagtacggtgttcgtatttgtagtagatatgatttttttatttacggaatggcggtatttattgtttcgttgttttttttcgggttcgtttgaattttagtatttatttagatttaggtgggtttaaaagaaaataataataataggcgttttttaagggaaattttttttcggttttagatagtagttaaattttaggtgatttttcgatcggacgcgggaataaaatttggaagttgaaattattgagatttttcggttaagtatatttgtagggttttgtattaaggagaatagtgtataaaaagatatataggattttgatatttcggttttaaaataggtttttgggggtaaaataagttatcgtagaagtagcgtttttggtattagcggcgggggagggggatatttgttagaagtagaaattagatttaggttcgtaggtattttagagtataggtttaggaagatgggttttagattcgttagaggtgcggcgtttttttcgggcgtttgggattttttgacgggtgtcgttgggttgttcgatattttgggttttttagttttcggttttattttttgattcggtttgaggtgtagtttgaataagttgttttgtttgtgttggtaagtttattttttgtacgttggggttcggaatgggtaagaaggtgtttattttttattttaggttttggttttttttttttatagtaatattagttaaagttgttcggaggaatcgatatgttttttcgtttgggagcgtttacgtaggaggcgaagggagtcgatgggtattgagggttcgcgtagtatcgtgtcgtgggtttaaaggatttagaggattcggaatcgtttggtaaaggttatttatttttaaggagtttttttggatttcggcgttgttttttttttaatgggtaagcgttcgaattggagcgtaattttcgcgttttttgtacggaaggtagttagaataaattttttgttttttcggtacgggagatttttttttaatacgtatattttcggtttttgggtcggtatttaggtacgcgcgcgtttttgtgaggaagttttaatttttttttgattttaatttttttgtttagtagagtcgggaatcgaaggttttagtatttaagatagtttttttttaacgttttcgttttttgtttacgtgaagacgcggattgcgtggtcgcgtttaagatagtcggtatcggtagaaggggatttttttggaatttcggaggtttcgtagtcgtttggagaagaggatggaaggttgtcgggggtttttttttatcgttttttagggagtttaaatttatttattttttggaagttttggatttacgtttttatgaaatcgtaaattaggtttttgtaatagcgggagcgttttaatagcgcgttatttttaaagaggcgcgaggtggtgtttttggaaatagggttttcggttttaggtttgagttattcgttatttttgtttttattttagacggaagaaggcggttaggcgggtagagtaagattcgggtagatttgcgattttttttttcgttttagggaggggattttcgagtagaagatggaggttttcgagcgttttcgtagatttcgcgttacgcgtcggacgtttgtttcgtttttcgggataacgtgagcgtcggtagggattttagtaagtggtagattcgttaggattaagtaaggtggaaaggtcggggtttgcggtaaatttaggaggagggggtatttacgttcgttatttttttttcgcggtattggtatttattggatcgatattggcgttaaagggtattttgaagtatttatgtttagtaagggtatgttttggggtattatagatattaagttatagttattttaaaataattataaaaatgattatcgtaaataatagattgttttaatagggcgcgaagcggtcgtcgtatatagacgtttttggttttagttttattagatttagtttattgttcgtttttttgcgtttcgcgttaggtcgtatgtttttcgtttagaattttttgagttttaatttttttttttaaataatttttttttttaaataggtaaagtgaggcgaggagttgaggggtttataggtttttaagttttcgaggagggttcgggtttacgttagtttcggttcgttaaacgagatttcgtgggtatagtttttaatttgataattatttgttttattttatagtaggtaaaagtgaatttttagtcgtttaattatttgaaagttataaaggtgtttagggttgaaggttatttttttagcggttttattagggagttcgttagagatatgtttgattttttttttgttttgtttcgggggggattttcgttcgtcggaggttttatacgtttggtcgtgggatggtagatttttgttatttttttattaatatttcggagtttattcgtacgtattttaatcgttcggagcgtaggttcgaggattaaggcggtagtttcgtgttttttgaggtttttttcgtttcgtgttttgggtcgttatatatttttcggttaagttcggcgtttttaatttagaatttggtcgtttttaggcgtggagtaggttattgttgttagacgttgcgcggattcgtttttttgcgttagtattgggcgataggtagttcgggtagtatttaggagttattttgtacggttttaggcgttcgttttatttagcgttatttttcgtttttcgtagcgagttttttcgtagttttttttttttgttagttttcggggtcgtatttgttttttatatagatatttttttttttattcgtaggaattggaagtttatggtgttagttttttaattttttgtgagttgaggagtttaagagt

SEQ ID NO: 33 - DNA, 2296 bp, Artificial Sequence
  chemically treated genomic DNA (Homo sapiens)
gttattgtattttgttaatattttttaaaagtaaaaaataaattaaaaaaaaagtttttagtggattgttgagttttttttgataggaggtattaaatgtgttttttttgaggataggggaagagtttattatttagttatatttttgtatattttataaaatttatttttattaaggatgtttttttataaaatgaggagtagtataaagaatatttaagaaattaggtttgatttagggtttttgatgttggggtaggtttttcgcgtgttaatattttaggggattttgttgtagttttttgaatatcggttgtgagttttttaattttagttgagttttagtattttttttatattatttattttttttgtttgtttttggcgcgtttagataattggaatttttgttgatattttaaatgggttggttatttttttagcgtggaggtatttagtataaggtgtgatagattagtatttgttgatgagtaataaagttattttggtaaattggattttttttttgaaacgttttggtttttatatttttaatgatgggttaagaaatagtttttaagaagaaggggcggagatagggggtaggattttgtttgaagtttttaagttgattttgtttgtagttatttaatttattagggagggttggatttgtttttttgtggtggatttttcgtatttttagaaagtgtaggggtggagaattaatttagttttttttttttttataagagtttcgttaggttagtttgtatgaggagggtacgtgtatatttttaaaaggattggtgtagttatttttttaagtttatagttttagtgtgagtttagggtttagattcggggtttttggtgttttaggcgtgagttaagttttttgagtaagaggttttatgataaattagttggagtttgggggttatgaaagtattggttatggtagaaattattagttcgttatcgtttatgttgttttgtttaaaaatgatatcgcgtaagggattttgttaatttttaatttcgggagattatttattatttggttgtggttcgtcgttgaataggaaagtatttcgagatgttaagagattaaaaggttcgtaattgttgtttagaaatgaaaatggttttaaattataattagagatggaagcgcgttttaggggagggcggggcgttgtgtaatcgagttttttatgcgtaaggcggatataaacggtttatggatgtgggcgaaggtttttagagtaaagaatgtttatttttattagattaaaatatagtttgggaaaataattatttgtttgagattttgggaaagtaaaattttttggtttttttgttaggaagaacgattgtaaaataagggttgagaattttttaaataagattttagaattttatttaaatagttgtagtttatttttgaggagttttagatttatttgggtttgatggatgttgtaatattaagtttgaggtttttttagtttggtgttaagagtgggttttaggggataaatagagaatagttgtttttttaatcggagtagaaaataaaatttttttttttttttatttttaatttttttgttttgttgtgaaattgttattgcgtttttgaggagtgattaaaattttagttatgattaatttaaagggtaggtttttaggtagggaagggaaaggggtttaaggtaaaaaaaaaaaaaaaaagttagttgaagtgagtttatggaggatttggggattataaaagttatgggatttgagttaattaaaattaatggaaaagtattaatatgtaatttaaaaaataataataaaataaagtagtaaggatatttttggtttgttttttgtttttatttttgagtttgtttgggaattttggagtagattttttgaagtatagtatgagtgtttaatggttgttttaatttatttttttgttttttatatataaagattttgtaatggagagtgggaatgaatggtttatttatttttgaatattttttgtgagttgggaatgcgtttagtaaggttgttggagtggagggaaaagaaaaggtgtttgagttttttagatatgggtagaaaaggagagaatttgagataggttgagagaaagttgtttcggttggtagtattgttagatttttagatatatcgtatattttagttttcgaaaaggttattttgagtttttttagggtttttggggtttttattttattttaaatatttggaattgtttgtgtttgttataata

SEQ ID NO: 34 - DNA, 2296 bp, Artificial Sequence
  chemically treated genomic DNA (Homo sapiens)
tattatagtaggtatagatagttttaaatatttgggatgagatgagagttttaggggttttagagggatttaggatggttttttcgggggttggaatgtacggtgtgtttgagaatttggtaatgttgttaatcggagtagtttttttttagtttgttttaaattttttttttttttgtttatgtttagagaatttagatatttttttttttttttttattttagtagttttattgagcgtatttttaatttataggaaatgtttaggggtgggtggattatttatttttattttttattgtagaatttttgtgtgtgaagggtaggaaaataggttaaaatagttattgggtatttatgttgtgttttaggaagtttgttttaagatttttaagtaggtttaagaatggaagtagagagtaagttagaaatatttttattgttttattttattattattttttaaattgtatgttggtgtttttttattaattttaattgatttaagttttatgatttttgtgatttttaaattttttataaatttattttaattgattttttttttttttttttgttttgaattttttttttttttttgtttgggaatttgttttttaaattggttatggttgggattttaattattttttaaaggcgtagtgataattttataataaagtagggaggttgggggtgggaaggggagggagttttgttttttatttcgattaagagagtaattgttttttgtttgttttttggggtttatttttggtattaggttggggagattttaaatttggtgttgtaatatttattagatttaagtgagtttggggttttttaaaggtgaattgtagttgtttggataaaattttaaaattttgtttgggagatttttagtttttgttttataatcgttttttttggtaaagaaattaggaagttttatttttttaggattttaggtaggtaattgtttttttaaattgtattttaatttgatggaaatggatattttttgttttgagaattttcgtttatatttataaatcgtttgtattcgttttgcgtatgggaggttcgattatatagcgtttcgtttttttttgagacgcgtttttatttttggttataatttagggttatttttatttttaaataatagttacgagttttttagttttttggtatttcggagtgtttttttgtttagcggcggattatagttaggtggtgggtgatttttcgaggttgggaattggtaaaattttttacgcggtgttatttttaagtaaagtagtataaacggtgacgagttggtagtttttgttataattaatgtttttatggtttttaggttttaattgatttattatgaggttttttgtttaggggatttggtttacgtttgaaatattagaggtttcgagtttgggttttgagtttatattgggattgtgagtttagggaagtggttgtattagtttttttggaggtgtgtacgtgttttttttatgtaggttgatttggcggggtttttatggggaggaggggggttgagttaattttttatttttgtattttttggagatgcggagagtttattatagggaggtagatttagttttttttagtgaattaagtgattgtaaatagagttagtttggaagttttaggtagggttttattttttattttcgttttttttttttgggggttgttttttgatttattattaaaaatgtaaaagttaaaacgttttaggggaaaagtttaatttgttagaataattttgttatttattaataaatattgatttattatattttgtgttaggtgtttttacgttggagaagtagttagtttatttaaaatgttagtaaagattttagttgtttaaacgcgttagggataggtaaggaggataagtggtgtgaggaggatgttgggatttagttgaagttggaaagtttatagtcggtatttagagaattgtaatagggttttttgggatattagtacgcggggaatttgttttagtattagaggttttgggttaggtttggttttttaggtgttttttgtgttattttttattttgtggagaggtatttttggtagaagtgaattttgtaaaatatgtaaaggtatggttgaatagtgaattttttttttgtttttaggaaaagtatatttggtattttttgttagaggggatttagtaatttattaaagattttttttttaatttattttttatttttgaaaaatgttggtagggtgtagtgat

SEQ ID NO: 35 - DNA, 4247 bp, Artificial Sequence
  chemically treated genomic DNA (Homo sapiens)
ttttaaaaaaattaaaatataaaataataataattattaaaaattttattttcgtttttttaaataaaaaatttattttaaaaattttaatttaaaaatttaaaaacgaaaaacgcgtattataatttttaaaaattttcgaatttaaaaacgattttcgtttttcgtttttttcgcgcgacgaaatcgaatttattaataaaaattcgaaataaaacgaataaaaacgaaacgaaacgaaattacgaaaaaataatcgacgaatcgcgtcgcgaattaatattttaaaaaacgcgaaattcgaataatcgcgcgttaaaaatttcgaaacgaacgtcgcgaaattttttcgaattataaataaacgattttacgacgcgattcgaataaaaattcgacgattttataaaaaaatttaaaatatcgacgtcgaattttttttaattttcgtaataatcgatacgttatataaaacgaaaaaaaattcgaaataaatttcgaaacgcgaattaaaaaaaacgaattcgattcgcgattttaacgtttttcgatcgacgcgaaaaaaataaaattaaacgttcgcgcgaatttcgaaaaaaaaaaaaataaaaaattttaacgattaaaaatttttcgaacgtttatttcgaaatttttttcgtcgttttttatttaaaatatatcgaattcgatacgattttatcgttttattttttattacgatttttatttcgaattaaatttaattaatttattataataattatcgataatcgttttttcgtttcgtaatatttcgtaaattttaaaatcgcgacgtcgtcgaatataaatttcgaatttaaaacgcgcgatttttttttttacgatcgtcgttttttaaaaaaaattacgcgaatataaaaaatttatttaatacgttttataaaatttattatttttttttcgatcgcgaattacgtcgataattcgaaaaattcgatttttcgttttttatttttttttttttttttttttttttttttttttttttattttttcgtttattcgtcgtaattttataaaaaaaaaatcgtttttttaattattttttttttttattttttatatatttttttattttttttcgatttataaaaaaaacgaaataacgattaaaaaacgttaaaaaaaaaaaataaaaacgtaaattacgaatttataaacgatattcgatttcgcgttcgacgaaaattacgaattaattcgaattcgcgtttcgttttttcgcgatatttaaaaatcgttcgaattaaaatcgcgttatttttcgtttaacgtcgacgtaataaaatttacgcgatataaaattttcgaaaatttaaaaaattttaaaacgttacgaatttaatatttttttatttataaaattttaaattaataaaaaatatttcgcgaattttaaaaaaaaataataaatattttttattttattcgaatttttttaataaaaatttatacgtacgataacgttattacgtttataaataacgttaaaatataaaaaaaataaaaaatcgaaattcgaaaattttatttcgtaataaaatttaaaatttaatttaaattttaaaaattcgtttaaaatttaaaatttaatataataaaaataaaaaaaattttcgataatttatttttataattaaaaaacgttaattaatatttttaaatttttatttcgtaaataaaataaaaatatacgaaattatttaaaaaatttttattattcgttattattaaatataatttaaatttcgtaaaaaaaaataattttattttaaaattaaaatttttaaaatattttaaaattcgataaaaaaaataaaaaaaataaaatttaaaaattaataattttatatttaatatttttcgtatttttttttttttttatattttttaataatttttataattttaattatttttaaattttatttttttcgtttttttttaaattaaaatattaaaattaaattataatttaaattatatttatattttattaaaaaataaaaattttaaatttatcgcgtttttttttattattaattttaatttaatatttaataaatttttttttttaaattattaaaataaattcgcgtaaattcgatttaatcgtcgttttcgaattatcgaataaatcgatcgtttcgtcgttttaaaaattatttttattttattttaatttaaatttaaaaaaatttaaattaataattttaatcgaaaaaacgaaacgacgtttattaattattattaaaattattattattattattataataattaacgtaatatttttaatcgataattttttataaaaaaaaatattattttttttttattatatttaaaataaataaaacgaataataaaaaaataaaaaaaaaaaaaaaaaaaaaaatatatatttttaataaatttttaaatttaaaaattatataattttatattaattattatttttttttaaataataaaaatttataaatttattacgtttattttatatttaaaaaattaatattttcgaaatatttattaaataacgaaatattttaaaaaaaaaataaaataaataaatttttaatttttttattaaatttaattataatttataaaaaaaattttttttttttttttatttttttttattaaaaatattaaatatattaaatttaatacgtttattttataaataaaaaaaaaaaaatataaaattaataattaatttaataaaaaatataattatataatattaaaattttttattttatttatttttttaatttatttttatttatttttaatttaatatttaataaaataaaaatttattaattttttcgtatttatttattatttaattttataattattttttaattttaattaaatttcgtaaaatattttaaatttatttttaataatttttaattatcgttcgattatttttatttttttatttttatatatttatttttatttcgttaaattaattaaattttaattaaaattaattttttatttttttaaataataaataataattttttaaataaaattttaataaatattaataaattttttttttttttttaaaattataaaaataatattttttatttaaaaataataaattttttaaatttttttcgatttaaattaaaaaaattaatttataaaatataaaaattatattttttttcgatttttttttttttttcgttattatttaattttttaattaatttttttttatttttaaatttaaatattttaataattaatataaatttatttttattaataaaataataaaaacgatatattaaaaaattatatatttatttaaaaaaaaaaaataaatttatattttttaaatataaataaaaaatttaaaatttttttatttttattaaaaaaaaaaaaatttttaatttttaaaaattaacgttttttaaaaattaaattattttaattttaaattttaattttattataaataaattttataattttaaataaattattaaatttttttaaattttaaatattatatttattatatttaaataattaaaaaaatttaataatataatattatataaaatatttaatttatattaattaaaatattaatttaaatcgataaaatatataatttaaaaataaataaatttataaaaatattttttattaaaaataataataaattaatatttttaatattaaaattttaaaatttaaaaattaaatttaatttaaataaaaattataaaattaaaaaaaaattaaatttataatataaaaaaaattttaaataatttttttatttaatattttatcgtattttttttttatttaataaaaaattaaattattaaaaatttaaatttattttttaacgtaattatttaatttatttcgattttttttttaataataaaataaaaaaatcgtaaaaaaatttttataaaataaattattattattaaaatttttttaatattattttttaattatataaaatttaaaaaataaattaaaaataaatttttttaaaaaaatataaaaattttttaaaaaaaaatttttaaaaattataaaaaaaaatttaaattataaaaatatataattttaaaaaaaaaaatataatattataaaaatattatttttttttaaaataatttttaaatttaaatata

SEQ ID NO: 36 - DNA, 4247 bp, Artificial Sequence
  chemically treated genomic DNA (Homo sapiens)
tgtatttaaatttagaaattattttgaggagaaataatatttttatagtattgtatttttttttttaggattatgtgtttttataatttaggtttttttttgtagtttttagaagtttttttttaaaaagtttttgtgtttttttggggaggtttatttttagtttgttttttgagttttgtgtagttagaaaatggtgttagaaaaattttgataatagtagtttattttataaaagtttttttgcgatttttttattttattgttgggaagagggtcgaggtaggttaggtggttgcgttagaagatgagtttgggtttttagtgatttagttttttattaagtagagagggggtgcggtagggtgttgggtaggaggattgtttgaggttttttttgtgttatgagtttgatttttttttaattttatagtttttgtttgagttaagtttaatttttagattttaaaattttagtattgaagatgttagtttgttattgtttttagtagaggatgtttttataggtttatttgtttttaagttatatgttttatcgatttaaattagtgttttggttggtgtgggttaggtattttatataatattgtattgttgaatttttttagttatttagatataatagatataatgtttgaggtttagagaggtttagtaatttgtttggggttatagagtttatttatggtagagttgggatttagaattagggtagtttgatttttgagagacgttgatttttgagagttagagatttttttttttttaatgggagtagggagattttaagttttttatttgtgtttagaggatgtaaatttgttttttttttttaagtagatgtgtagttttttagtatatcgtttttgttattttgttaataagagtaggtttgtgttgattgttaaggtatttaggtttagggatgggagggggttggttagagagttgggtagtagcggggagagggggagggtcgggaaggggtatggtttttatattttatgaattaatttttttggtttgggtcggggagggtttagaggatttattatttttgaataaggggtgttatttttataattttgaggaaggaggaaagatttgttgatatttattgagattttatttaaaaaattgttatttgttatttgagagagtagggggttagttttggttagggtttaattaatttggcgaagtaaaggtaggtatgtaaaggtaggaaggtgaaggtagtcgggcggtggttgagagttattgaagataaatttaagatgttttacggggtttagttaggattagaaggtagttatggggttaggtagtgggtggatgcggggaagttagtgggtttttgttttgttagatattaagttggaagtagatgaaagtgggttaagaggatagatggggtaaggggttttagtattgtatggttgtattttttattaagttggttattggttttgtatttttttttttttatttataagatgggcgtgttagatttaatgtgtttaatgtttttagtagaaaaaagtgagaagagaaaggaggttttttttataaattatagttaggtttagtgagaagattagaggtttgtttgttttgttttttttttaaggtatttcgttgtttagtaggtgtttcggaaatattagttttttgggtgtaggatgagcgtaatggatttatagatttttgttgtttagagaggggtagtgattagtataaggttatatagtttttaagtttaagggtttgttggaggtatatatttttttttttttttttttttttatttttttgttgttcgttttatttattttgggtgtgatgggaaggaagtgatatttttttttatgaaaagttatcgattgggaatattgcgttaattattataataatggtaatagtagttttaataataattagtagacgtcgtttcgttttttcggttgaggttgttggtttaagtttttttaagtttgagttggagtaaaataaagatagtttttgaagcggcgaaacggtcggtttattcggtagttcgggagcggcggttaggtcgagtttacgcgagtttgttttagtagtttggggaggggggtttgttaagtgttgagttggagttagtagtgagaagaaacgcgatgggtttgggatttttattttttaatagggtataggtgtagtttaagttatagtttaattttagtattttagtttgggggagggcgagagagatagggtttgggggtagttgaggttataagagttattagagggtatagaaagggaaggaggtgcgggggatattgaatgtgaggttattaatttttaagttttattttttttgttttttttatcgggttttgggatgttttaaaagttttagttttaggatgggattgtttttttttacggagtttgggttatatttggtggtgacggatagtgagagttttttagatggtttcgtgtgtttttattttatttacggggtagaggtttagaggtgttagttgacgttttttaattgtagaagtagattatcggaggttttttttatttttgttatattaagttttaggttttaggcgggtttttaaggtttggattgggttttgagttttgttgcggggtgaagttttcgagtttcgattttttattttttttgtgttttagcgttgtttgtaggcgtagtgacgttatcgtgcgtgtgggtttttattagaggagttcgggtggggtaagaggtatttgttgtttttttttggggttcgcggagtattttttattggtttaagattttgtaaataaagggatattggattcgtagcgttttgggattttttgggttttcgggggttttgtatcgcgtaagttttattacgtcggcgttgggcggagggtgacgcgattttagttcgggcgatttttagatatcgcggagggacggagcgcgggttcgggttggttcgtagttttcgtcgagcgcgaagtcgggtatcgtttgtaagttcgtagtttacgtttttgttttttttttttgacgttttttagtcgttatttcgttttttttgtagatcgagggaagataaggggatatataagggataggagaggagagtaattagggaagcgattttttttttgtggggttgcggcgggtgggcggagagataggagaggaaaagagaaaagggaagagaaggaaggggtagggggcgagaagtcgggtttttcggattatcggcgtagttcgcggtcgaaagaggaatagtggattttataaagcgtattgagtaagttttttatattcgcgtagttttttttaggaaacggcggtcgtagaggaaagggtcgcgcgttttggattcggagtttgtgttcggcggcgtcgcggttttgaaatttgcgggatgttacggggcggaggggcggttgtcgatagttgttataataaattagttgagtttagttcgaggtggaaatcgtagtaggaagtgggacgatagagtcgtatcgggttcggtatattttaggtaagagacggcgaaaagagtttcgagataaacgttcgggaagtttttggtcgttaaaattttttgtttttttttttttcgaagttcgcgcggacgtttagttttatttttttcgcgtcggtcggggagcgttgaagtcgcgggtcgggttcgttttttttggttcgcgtttcgaaatttatttcgggttttttttcgttttatatagcgtatcgattgttacgagggttggaggggattcggcgtcggtattttgaatttttttgtagggtcgtcgagtttttgttcgggtcgcgtcgtagagtcgtttatttatggttcggagaggtttcgcggcgttcgtttcgagatttttagcgcgcggttgttcggatttcgcgttttttgagatattggttcgcggcgcggttcgtcggttattttttcgtagtttcgtttcgtttcgtttttgttcgttttatttcgggtttttattggtaagttcggtttcgtcgcgcggagaaggcggggggcggggatcgtttttgagttcggggatttttgggaattgtagtgcgcgtttttcgtttttaggtttttagattggagtttttggaataggttttttatttagaggagcggaggtaggatttttagtaattattgttgttttgtgttttagtttttttggag

SEQ ID NO: 37 - DNA, 3905 bp, Artificial Sequence
  chemically treated genomic DNA (Homo sapiens)
tttaaaaaagtagatttgaagatgtttaaagtaataatggtgttgttagaatggtgtttttttttttttttaggggatgattttgaaggatattataataatagatgtgtaaattttgaaatatatggttaaaatgaggtttattattttttagttattatttagatattttttagttatttgtttatgatagtttataaatgagaaagaagtttatttaaaatatttttatgaggattttaaggtaaataataggaattgattatttattaatttggtttggttttggtttattgaagaaagtttttttttgagtgtatttaaagtttttatggtttagttttgtttaatttgagtagtattttatttgttttttttttagatgttttgatgttttgtattagatttaagagagagttaagttttttaataggttatgtatgtggttattaatatttagtatatgttatttttggttagtttttttttttttttttaagaattaaatattttttggtttgagttttttttttttatgttattataaagttgagttatttattattagggtttatatatgagtagttaaaatatatgggtttttatatttaggttaaggggtttttagtaggagaatatgaataattaggagtgaggttatgagatagaggaagaaaagtttataggaatgggaagatagttttttagatgagaggtgtgtggagtgattgttgtgaggaattgtttaataggaaagttagttaatttgaggatgtttttaggggaggaaaagggaaatttatatggttttttgttaatttttaaaaataaggtagatttttatttatttagggtgtttgtttgttatgaatataggaagattaaggaatgagtatggattgtttttattttatgtttttggataagaagaataataaaaaagtattgggtagttggaataattgtagaggttttaataatgatggagattttttggtgtattgtggtataggggttttttttaaagggatttaattaattttaataggtattattttttgtgatttaagatgttttttttaggagtgtttgtattttttaatgtttagagaagtttgtattattgatttgggaatattgagttttttagtttttgtaaaattatttttaggtttatttttaagtatattttttattttggggggttaaattttttggtttttagtgaatattgtggttatatttgtggttatttattgattttttatttgtttagtttatttgataataggtaaatggggaaagaggttttaatattttttaaaaggggaagattgataattagttatttattgtatagaattaggttaggttaattttttttaagaagaaaagtaatttggatattgtattttggggtttttttttattttggtattataggttttatgaggatgtagtttttttgtatttttttttttttttttaaattgttatttatttatttattttaattaggttaaagtattatatattgtagaagagaaagtaattttagttttttttaaatggtgttatttttatgatagtttgtaaattttggttttttatgggtttaggatttgtgtgtatttgtttggggatttgttggtggatttattttttatggtggagtagtaaggggattttttagaaaaagtaatgggtgaagtaattgaaagagtgatgtagaaagtaatagttagaaatggtggggatgtgagtggtttagataggaagggaggtggtggtgtagttttggtgtgtagtgtgttgtagtgatggaatttttgtaaaagttgtttgtttgtgtgttattagtggtgtgtaggtttgtggtttttttgtttttgtaattttgttttaattgttggtttattttttgataaataggatgtttttatttgaggttgttagtattttaggttttttgaaagaaaagaagtagagtggttttattttagaggtaaggatggggtttgtgttaagaggttttttagagaagtgaaaattttgtaggtgtagttgttgggagagtattaagaagggtagggtggaggggtagggggtgaagggagggggtgaagtttgtattttatttttatatgaaattgattttattattttatttttgtaagtgtttagaggtagagaggttaatattttggggatagtttggaggtgggagatttaggtagggttttttaaatttttatgtgtatgaaaattaggttaattatggggtttttgagtaaatggggatgatgatttagtaggtttgggttgaggttttagattttgtatttttaataagtttttaggtggtagtgatgttgttagtttaaagattatattgtgaatagtaaggtgttgttgggatagtttgttttagagtaaaatttaatagatgtgtaaatatttaaattaagttgtatttatttttgaggttttggtttaattggagttattttgttaatggaaaatggaaaatgaaatttttttaggttttaaagggaaggaaagtttgaaatggttaaggtatttaaaaaattttagttgggagtggttttggggatttgggagagttgaagttaggttttgagttaagagatgggggaggaagggtgggatgtggtaaataaatataaatatatatatataaattttagtttaattataggtttttttttattaatgaaatatttgtattttgtaggtagaatttatatgtgtttatattttttagaagttgaatggttttgtgtaatggtatagaatttggagtttatatttgaatattttagatttaatgttattttagattggttttaggattttgtggtttatatttaaaaatgtatgtttttgagttatgtttaattagtagtagtatttgagaattgagagattagattaagaaatttatggtatatgaataaaatttttagatagtagttagaatatagaggtttttttagaggtagtgttagttgttagttgtaaaaataggttttgtttagttttgtttaggtttgaagttttttgaagattttatttagattttattaaaattagttaaagattttttgttatagaaaggtttttaaagtatggttgggattatagggttattaagatgtagatttttgggtttttttgttttatttattatggttttttagggtgggtgttgggaatttgtattttaataaatgttttgaggatttttatgtattgttaagtttaggagtttttggtttgtaggtttaagtttaatttttttattgtagtatttaaagatttggttttaattttgttgtttataggtgagttttagtgatttttttattgttttttgagtatttttggagttatttggttgttttatttatttttttttttttgtttttttttagttttggaataaaatgatttttatttttttttttgaattttttttagattatggttttttatttagtaagtagttatttttttggtttgttattgttgtggtattaatgataggttatttgatttttattttgttgattgaatattttttatgtttaggttttgtttttttgattagatagtaagttttttgaagttattttatgttatataatttttatgtttaagattattttttaatgtagtgttatgtttatatggattatttagtaaatttattgatggtttatttattattaatatgttttatagagtgttattaagtagggatattttttatgggtttaggattagaagaagttgggaagagaaatggggtagtggtgagagtgttatgagaatttggttatatagttattaaagatatagaggaagtgggaaaaagggagtgt

SEQ ID NO: 38 - DNA, 3905 bp, Artificial Sequence
  chemically treated genomic DNA (Homo sapiens)
atatttttttttttttattttttttgtgtttttgatgattgtataattagatttttatgatatttttattattattttatttttttttttagttttttttgattttagatttatagagagtgtttttgtttaataatattttgtaaaatatgttggtgatagataagttattggtaaatttattgaatgatttatgtggatatgatattgtgttagaaagtagttttgaatataaagattatatagtatgaaatggttttagagaatttattgtttggttagggaggtaaagtttaagtatgagaaatatttagttaataaaatgagaattgagtggtttattattaatattatagtagtggtagattaggaaagtaattgtttgttgagtgggaagttatgatttgaagagagtttggagaggaagatggaagttattttattttagggttggggaaagatagaggagaagaaatgaatgaggtagttaggtggttttaggagtgtttagagggtagtgaggaagttattgaggtttgtttgtgaatagtaaaattgaagttaggtttttgaatgttgtagtgagaaggttgaatttaaatttgtagattagggatttttaaatttggtagtatataagaatttttaaagtgtttgttaaaatgtaggtttttggtatttattttgagaaattatgatgagtgaggtagagaggtttaagaatttgtattttaatagttttgtagttttagttatattttaagaatttttttgtaataggaagtttttgattggttttgatgaagtttaaatgaaatttttaggaaattttaggtttaagtaaaattgagtagaatttatttttatagttgataattggtattgtttttggagggatttttatgttttagttgttgtttggagattttatttatatattatggattttttagtttagttttttagtttttagatattattattaattaaatatgatttagaaatatgtatttttaaatgtaggttataagattttaaagttagtttgagataatattggatttagaatatttaaatatgggttttaaattttgtattattatataaaattatttaatttttgaaaaatgtggatatgtgtgagttttatttgtaagatgtaaatgttttattgataggaaagaatttgtggttgggttggggtttgtgtgtgtgtgtttatatttatttgttatattttatttttttttttttattttttggtttagaatttaattttaatttttttgaatttttaaggttatttttaattaggattttttaaatattttaattattttaaattttttttttttttggaatttaaaggaattttattttttattttttattagtaaggtggttttagttaaattagggttttaggaataaatatagtttggtttaaatatttgtatatttattaggttttattttaaagtagattgttttgatgatgttttgttatttatagtgtggtttttggattggtagtattattattatttgggaatttgttagaagtgtagaatttgaggttttagtttagatttgttgaattattgtttttatttgtttaagagttttgtgattggtttgatttttatgtatataaaagtttaaggagttttgtttaaattttttgtttttaagttgtttttgaaatgttggtttttttgtttttggatgtttgtagagatggggtagtggaattagttttatgtgggggtagggtgtgggttttattttttttttttgttttttgtttttttattttgttttttttgatgtttttttagtggttgtatttgtagagtttttatttttttgggaagttttttgatatagattttgtttttgtttttagggtggggttgttttatttttttttttttaaagagtttgggatgttgatagttttagatggaggtattttgtttgttgaaaaataaattggtagttaaagtagggttgtgagagtgagaaaattataggtttgtgtgttgttgataatgtgtgggtaggtagtttttgtagaagttttgttgttgtggtgtgttgtgtattagagttgtgttattgtttttttttttgtttgggttgtttgtgtttttgttgtttttggttgttgttttttgtgttgtttttttagttattttgtttattgttttttttaaaggatttttttgttgttttgttatgagggatggatttattaataagtttttgggtggatgtgtgtagattttggatttataggaggttaaaatttatgagttgttatgaaaatgatattgtttaagagaagttgaagttgtttttttttttgtagtatgtaatgttttgatttggttaaaataaataaataaataataatttaaaaagaaagaaagaaatatagaaagattatatttttatgaggtttgtaatgttaaaatgaaaagggattttaaagtgtaatatttagattgtttttttttttggagagagttgatttggtttgattttatgtggtgaataattaattattaattttttttttttgaggggtattaaagtttttttttttatttgtttgttattagataagttaggtagatgagaagttagtgggtaattataggtataattatgatatttattggaaattaaaagatttgattttttgaggtaaagaatgtatttgaaaataaatttgaaaatagttttataggagttgaaaaatttagtgtttttgaattagtaatatgaatttttttgagtattaaaaagtataagtatttttaaaaaggatattttgagttatagaagatgatgtttgttggggttgattgagtttttttggaagagatttttgtgttatggtgtattagaaagtttttattattgttggggtttttgtagttgttttagttatttagtgtttttttattattttttttgtttgaaaatatagagtagaaatagtttatatttattttttaatttttttgtgtttataatgagtaagtattttagatgagtaagaatttattttatttttaagaattagtagagaattatatgagttttttttttttttttttagaaatgtttttaggttggttaatttttttattgagtaattttttatagtaattattttgtatattttttatttgagaggttgtttttttatttttatgagtttttttttttttgttttatggttttatttttaattatttatgtttttttgttgaaggttttttgatttaaatatagagatttgtatattttggttatttatgtatagattttaataatgaataatttaattttatggtgatataaaggaggaaaatttaggttaaagaatgtttaatttttagggaagaaggagagagttggttagggatagtgtgtgttgggtgttaatagttatgtgtatagtttgttggggaatttggtttttttttgaatttggtgtagggtattggaatgtttgggggaggagtagataggatgttgtttaggttgaatagggttggattatgagagttttgaatgtatttaagaaggaattttttttagtgggttggggttaggttagattgatgaatgattgatttttattatttattttgaggtttttatggagatattttaaatggattttttttttatttataaattgttataaataaatgattaaaagatgtttaagtggtgattagaaaataataaattttattttagttatatattttagaatttatatatttgttattgtagtgttttttaaagttattttttgggagggagagggagtattattttaatagtattattattattttaaatatttttggatttgtttttttgaa

SEQ ID NO: 39 - DNA, 5338 bp, Artificial Sequence
  chemically treated genomic DNA (Homo sapiens)
ggtaattttttttgttattattttttgtataaaatatgtaagatgtttttattttattagtattgaaattaaagattaaaagagagaaaggtgttggattgaaaaggaggtggtgtaatggttattttttttagtattttggttttgttttttttggggaaggtggttatatttttatttgttttgtttttgaatgtagtaaataattttataaataattattgttgtttatgttttttatttgtttttttggttttattagatttttgtttttttgtattttttgggtagggtttttaataagtttaggttgaaagaatgtttgttattttttttatttttgttgaaagaaaaggaagaaaaatagtagtagtgagaaatttttggggtgattttttttttgtttttaagtattagtgtatagtatttttttttgtttttgttgtggttttttgttgttttgggttatgttgtttagttaagtaatttggatttgagagtgtatagttaggattagtttagggggtgaggggttggtttttgggaaattaagtgtttaggatagaggtggaaagtgggttttgggagttagaaaagagagagaagggtagatggttgggtggtaaatataaaaatagaaataatttagggggatgtttgttaggtttttgtgtttgtttttttttttttaatttggagtaggttttttttggttttttgtgttttggggtgttttttggtggtagtggtagtagtgggtaatgtgtggagggtttagggggtgtataggggatttttgggtatatttagagaggtgggtgtggttttttggtggtggtgatgtagttatttggtgagtggagttttgtttttttggtttggtgggtttatggttgttttattaagtattgtggttgagtagggtaggaagttgtttttggaatgtggtgttgttgtgttgtagttgaagtttgagttttttttggttttggtgtttttgttgttgttgttattattattattgttgttgttattgttattttgggaatttagggttgtggtagttgttgttgtggttgttgttgttgattgattgttgtggtaattgaggtatgagtagggtgtagagttgttgttggggggtgtgttggttgttgttgttgaggaggttgtagttgttgtggttgttgtggttgttgtggtagaggttgtgttgttgagttttgtggtggttgtgggagtttggtagagattagggtggtggaagttatatagtagttttggttgagagtaggggtgtgagagggtgtggaaggtgtttagtggttggatggaagtagtgaagggtgatgaagttgtggttgttgtgtttgaggttgtagttgtggttgttgttgttgtgatgtttatgtgtgggtagtagtgtagtggtatgtgtgagtggaaggggtagggtaggtttttggtggtggttgtgtgtgttattatgtaggtgtagaagttggggttggttgggtgtggttaggatatggttaggtgttgttgtttgttttttatgtgttggttttggaattatatttgtggggagagatgtgttgtagtttgggttagggagtgttttgtgtttttagtttttgttttaggatttttgttttttttggatttttgaatggtttggtttatttttttttgattaagtttaattttgagtattttgtggttttttagttgggaaagtgtggatggtagtgtgtggattgttgtgggtatattgtttttaatgaagagggtttttttttttgtgtttggttgttgttgttttttaggtttttatttttttattttttgttgtatttttttgttttaatttaatttttttttttttttttgttatttattagtgttggttttgttgagtatttgttttttaattttaggatttgtatggggattttgggtagtttttgaagagaggttgttgtttagtttttttgagaggttgttgtgtgaagttttgagttttttgaattgtaaggatttgtttttaggggtatgggtttgattttgatattgaagggatgattttgttggaattgtttgttttaaatgagtgggtagagtaatgtttttataaatggggaaggggatgtttttattttttttaatattatttaataaagatattatttgttataattttaaattaaagaaagtttgattaaattagagggagatttttatattttttttttattttgtggagatttttttttttttttgtagtgttgaatgttttatgaagggtttattaaattgtttaattttttggttattttttttagatgtataataaaattaataatttaaagttatatataaataaggataattttgttgtatttttttttgtaggaggttgttttttttttgttgtttaagaggaaaatgtttaggaaattattgttttaaattaattgattttaaagatatagtatttttttttttgtgtaatgatttatgtggaaaataaatttttaagtttaagagtaaatgaaaagttttatttttggtttttgtttgaggaataaagattaattgggtttgttgtttaggggaaagtggggttgtgggtatgggtgagggggtatttggttaggtgttgggtataatggagtaggggtgagtgtttttagtattggagttattatttgggggtttttttagatttgttaggttggataattgtttggatttggtggttgggaaataaataagttaatttttttggtgattattttttgtggatttttagatttttagttaaatttagttatttagaaaggggaaaggggaaaaagaaataattaatttagatgtttttggggaggttagagtaggtatgtattggaattgatattttgatggtggttttgggtaggttgagtgttgtggttagtttgtattggtggggttgtgatatatagtttttttggtagaattttttttttaggtgtgtgatttgtttgtgggtgaatgttgtatggtagtgttgtatttgatttgtgttagagttggagttatttagtgttgtgtttttgttgttgtttttgttgtttttatgtaggtttttgaggtttgagtttgatgttgatgttgtggtgttggtagttgagttgttttttgtgtattttggtaaataaatgattaatagtgtatgagtggttgtaggattaatagtttggtgttggtgttgtgtgtggattggggaagttttgttaggaaggagagttgttgttggaattgatggggtttgttatgtttataaattgttgttgttaatggaattaataaagtttggggagttttttataagtaaataatagaaatggaattaggagattttttttttaataattagaaatttttaattaaggaggaaaagtggttgagggaaaatgtttatttttgggtgtagtttgggaagttttgggttttttatggtttggagattgtagggtagttttttatatggtttttaatttttatttgagtttttggggttttaaatattttaagagttttaatatagtagtagtttaaatttaagttaatagggggtgaaatatattttttaatttttttttttgttgatttaaatagagatgttggtgaggttttttttgatttatttagaagaatgttttttttagttttgagggtataggggtaggggagtttagagtagttgtttagggtattttttttaaaagtaatttggttgttgattaggggtttattggtttgtttgggtttttagatatgagtgtagaaatatttttttggatttaggagtgagggtgggtgggtttggtgttttaggttttgtaggtttgagtttggtgggaaagtttaaggagtagaattggaaggtatggttttagatatgtgttttgtttttgtttgtgttagtttggtgtagtttgtttgtggagggtttgagaggggaaaaggtattgggaaaggttggtgggggttgtggaggagtaaagaggatgggattggagagtgtggtgtggttggtgtggttatttttgttattgttttttttaagttgagtggtgttgaggtttttgggggagtgaagtgtggagtagtttatttttatgttgttgtttatgttggttttagtggttgtttttgaataatggtttggttttttgtggtttttggtggtggaggagattttggaggagatggtgtttttgttgtttgtgtgttgtaggttgaataaagtgtttattttgaatttgtttttggtggggagtttttttagagtgttgtgtaggggggtagatggtaggtgtgggtttaggtgagttgggtgttgtgaattttttagggttttgagtatagtattgttagttgagttggataaattggagaattttttgtttgttgtagggttgtgtagttttttttttattagaattatttttttttttattttttttattattttagtttttttaaaaatgttatagtggttttgttgttttgttttaatgataggttgtgtttagggttaatttttatttagttttagtgaatgtttttaaatattattattgtttttggagggaggtggaaaaattgtgggatgttagagtgagggaatgattggttaaaatgatttatatatttttttgattttgagatgttatttattaaaaagtagtgtttgtttgttattaaggtatgaatgatgttgtttgaataattatttattgtaataggtttataagtaaataaatatatttttttgttagtgggtaatgaaggtagttttagagtagataaatagatttaggtaggaggtgagaagagataagtgaggaggaaggttttggttttttgtttgttttgagttagttttgtttgtttgggggtttggttttgggggtgaaattgatagtttgattaatagagtgtgttgtggtatatttttttttttatttaggggtattattatgtttttagtttgttaggttgttttttaggttttaattatgtagtgttttttttatttttttttggatatagatatgtattaaataatagataatggtttgattttttagagtaggtttttgggaaggtttggtttttttttttttttttttttttttttttattatttataagttgggggtataagtggggggagataagggggaggatgtaggaagagttgtgtaaggagaagattttgtgttttttttatttggattatttattttttggattttggaattaaatatgtattttatttaataaatag

SEQ ID NO: 40 - DNA, 5338 bp, Artificial Sequence
  chemically treated genomic DNA (Homo sapiens)
ttatttgttaaataaaatatatatttggttttgaaatttgaaagataagtaatttagataggagaggtgtaaggttttttttttatgtaattttttttgtatttttttttttatttttttttatttatgtttttagtttgtaaatggtaaaaaaaaaaaaaaaaaaaaaaaaaaaaattaaatttttttgaggatttattttggaaagttaaattattatttattatttaatatgtatttgtgtttaaggaaaaatgaagaaggtgttgtatgattaggatttaaggggtaatttagtaaattgagagtgtaatgatgtttttaaatgaagggggaaatgtgttgtggtgtgttttattaattagattgttaattttatttttgaggttaaatttttgggtgagtagaattggtttggagtgggtaaaggattggagtttttttttttatttgtttttttttgttttttatttggatttatttgtttgttttgaagttgtttttattatttattgataggagggtgtatttatttgtttataaatttgttataataaatgattatttgaatagtgttatttgtattttaatgatgagtgggtgttattttttgatgaatgatattttgggattggaaggatgtatgggttattttgattagttatttttttgttttggtattttataatttttttgtttttttttgaaagtgataataatatttagaggtgtttgttggggttgaatgagaattagttttaggtgtagtttattattaggatgggatagtagggttattgtgatatttttaagaaagttgagatgatggaaagaataagaaaagagatgattttgatggagagagggttgtatagttttatggtgggtaagagattttttaatttgtttaatttggttggtaatgttgtgtttgaggttttggaaaatttgtagtatttggtttgtttaagtttgtgtttgttgtttgtttttttgtatagtgttttgggagaattttttgttaagggtaaatttgaaatagatattttgtttaatttgtagtatatgggtagtgaaagtattgttttttttgaaattttttttgttgttgagagttgtaagaagttgggttattatttagaggtggttgttgaggttgatatgagtagtgatgtggaggtgggttgttttgtgttttgtttttttgggggttttggtgttgtttagtttaaggaaaataatggtaaaggtaattgtgttggttgtattgtgttttttagttttattttttttgtttttttgtggtttttgttagttttttttggtgttttttttttttttagattttttataggtaagttatattgagttagtatgggtgggggtgggatgtatgtttgggattgtgttttttagttttgttttttgagtttttttgttaggtttaggtttgtggagtttggaatattaggtttatttgtttttgtttttgagtttgagaaaatgtttttgtgtttgtgtttaagagtttgagtgagttggtagatttttagttagtagttgagttgtttttgggaaaggtattttgggtaattattttgaatttttttgtttttgtgtttttagggttggagggggtatttttttgggtaagttggaggaagttttgttggtgtttttgtttaggttagtgggagaaagagttgaaaagtatattttattttttattggtttgggtttgagttattgttgtgttggaatttttaaaatatttgaaattttgaagatttagataaaggttagaggttgtataaaaagttgttttgtggtttttagattatgggaaatttagagttttttaaattgtgtttagaggtaggtatttttttttggttattttttttttttggttgaaaatttttaattattaaaaaagaaattttttaattttgtttttattatttgtttatgaagggttttttaaattttattgattttattaatggtagtaatttgtaagtatgatagattttattaattttggtagtgatttttttttttgatggggtttttttgatttgtgtgtagtgttagtgttgggttgttggttttatagttatttatgtgttgttggttgtttgtttgttagggtatgtagagagtggtttggttgttggtattatgatgttggtgttgggtttaggttttggaagtttgtatggaggtagtggaggtagtggtgggagtgtggtgttgggtggttttggttttggtgtggattaagtgtggtgttattgtatggtgtttatttgtgagtagattgtgtgtttggagaaggagttttattgggagaattatgtgttgtggttttgttggtgtgagttggttgtggtatttaatttgtttgaaattattattaaggtattaattttagtgtatgtttgttttggtttttttgggggtatttgggttgattgtttttttttttttttttttttttttgggtggttagatttagttaagggtttggaaatttgtggggggtagttattaaaggaattggtttatttattttttggttattgaatttgaatggttgtttggtttgatggatttaagaaggtttttgaatggtgattttaatgttgaaagtatttgtttttgttttattgtgtttaatgtttggttagatgtttttttgtttatatttatggttttatttttttttaggtggtaagtttagttggtttttgttttttaagtaggaattagaggtgaaattttttatttgtttttgagtttggagatttattttttgtataaattgttatatggagaaaaggatattgtatttttaaaattgattggtttgagatagtagttttttgaatattttttttttgggtaatgaaaaaagggtaattttttgtggggaaaaatgtaatgaaattgtttttatttatatataattttaggttattaattttattatatgtttgggagagatagttgggaggttaggtgatttggtgagttttttatggagtgtttgatattgtagaaaaaagaaaaaatttttatggggtaggggaggagtgtggaagtttttttttggtttgattgggttttttttaatttagagttgtgatgaatgatgtttttattagatagtgttgggaggggtggaaatgtttttttttttgtttatggagatattgttttatttatttatttaaggtaaatgattttaataaaattatttttttaatattaaaattggatttgtgtttttaggggtaggtttttgtagtttggagggtttaagattttgtgtggtgattttttagaaaagttgagtggtagtttttttttaaaggttgtttagaatttttgtataaattttgggattgagagatgggtgtttagtgagattggtattggtgggtggtgggagggagaggaaaggttggattgggataaaaaagtgtagtaagaagtaagggaataaaagtttgaggagtagtagtagttggatgtgggggagaggattttttttgttgaggatggtgtgtttatggtggtttatatattgttgtttatatttttttagttgggagattatagggtatttggggttgggtttggttggagagaagtagattaagttatttagaggtttggaaggggtagaggttttgggataggagttgggaatatggggtgttttttaatttaggttgtggtgtgtttttttttgtaggtgtggttttagaattggtgtatgaaggataagtggtagtgtttggttatgttttggttgtatttagttgattttagtttttatatttatatgatgatgtatgtggttgttattggaagtttgttttattttttttatttgtatgtgttgttgtattattatttgtatgtgggtgttatggtggtggtggttgtggttgtagttttaggtgtggtggttgtggttttgttgttttttgttatttttatttggttattggatattttttgtgtttttttgtatttttatttttggttggagttgttgtgtagtttttgttattttggtttttattaggtttttgtggttgttgtggggtttaatagtgtggtttttgttgtggtagttgtggtagttgtagtggttgtggtttttttggtggtggtggttggtgtgttttttagtggtggttttgtattttgtttgtgttttagttgttatagtagttagttggtggtggtagttgtggtagtagttgttgtagttttgggtttttggggtggtggtggtggtggtggtggtggtggtggtggtggtggtgggggtgttggggttgggggaggtttggattttggttgtagtgtggtggtgttgtgttttgagagtggttttttgttttatttggttgtggtgtttagtaagatggttgtgagtttgttggattagagggatgaggttttgtttattagataattatgttgttattgttagggggttgtgtttgtttttttgagtgtgtttgggagttttttgtgtgttttttgagttttttgtgtgttgtttgttgttgttgttgttgttagggggtgttttggggtgtgggaggttgaagggaatttgttttgaattgggggagaaggagtaggtgtaaaagtttggtgggtatttttttaaattatttttatttttgtatttgttatttagttgtttgttttttttttttttttttggtttttgggatttattttttatttttgttttgagtgtttggttttttaaagattaattttttgttttttaagttagttttggttgtgtatttttaggtttgggttgtttggttgaatggtgtggtttgaagtaatggagaattataataaagatagagggggatgttgtgtgttggtgtttgggggtgggggaggagttgttttggaggttttttgttgttgttgtttttttttttttttttttaatgagggtgggggaggtggtaaatgtttttttagtttgagtttattagggattttgtttgaagagtgtgggagaatggaggtttgataaggttgggaggatggatggagagtgtgggtagtggtggttgtttgtgagattgtttattatgtttaggagtaaggtgggtagggatgtggttgttttttttgggaaggataaagttgaggtgttggaaggggtggttgttgtgttgttttttttttggtttaatattttttttttttttggtttttggttttagtgttgatggaatggaagtattttgtatattttatgtaaaaagtgatggtaaaagaggttgtt

SEQ ID NO: 41 - DNA, 5332 bp, Artificial Sequence
  chemically treated genomic DNA (Homo sapiens)
ttagttttaaattttgtatttgtattttttagataggaagttttttttttttgattagggattgagggagaagagatttagaatgtatttttttgttttaggttttttgggggggatatggttttagatagttattttgaaattgggtttaggtttttatagtaagttgagtgtttttttatatttttaattttggtttttttattaaagtttaaaagatttttttgttttttaggttttttttgtttggttgtttttattattttttaattgtggaaatattagttattatatgtttgttggagaataagtgtgagtgttgtggtggatagttgttgttaaaggtgtttagatggatggtatttttaaagtagggattttagtattttttttatatattattatttaagaatggtagaggaaagagtaggagtggggttatagataggagagaaaggaggttgaggttataaaattggtatttttttaattattaatttttttttttattattttgttattatttgttatggtaaagttttttttttgtgttttttttttaataaagaaatttttagttagtttttatttattttttttgatttgtaggaagttaaattgttagtagattgagttttttaagggatatttttgggatatgttggaattttgatttgtttaagatgatgatggttattagtataaattagaaataatgttattttttagggtgttatttgtaagtgtaataatatggatttatttgtaaaatttagttaaattgtgtttggataagtgattagatttaaatgataaattttttttattatttagttttttttaagttttgtgggggtagtatagaagattgttttagggtgaaattaaggtttagtttattatttgtgttagtttgagggattttggaaatgttgattttgagaaaaagataaaataaaataaaataaaataaaatttaattataaaatatattttattgtttataaagtaaatagaaatataaagttgtttttaaaattatttttttagtaaataagtatgtgatattttgagtaggagtaggagggagagaaagattgttatttaaaaaaatatgaaagtattaagtaataatttaaaatatggttgtttagaaaaatatttatatttattgtagttgtttaattggttttgttaaagttggtaagtatttaaattgtgttataattttatttaaattttgttttgttttagtaggttgaagagtttgaatagattaattattttataatgatgatgaatgagaaattaatttagatataagtaagataatttaggtttttatttgtttaaatagttttttaatattatttgttattgtgggttatagattgaattaattgtttaattttgtgaaagttatatttttgtgtttttattgagattatttatagtgtagtgagtgttgttgaaaggtatatgttgttaatagggataattatttaaagggaagtgtttgtaaaatggaaaataaatgttggggttggtaataaatgggattaaaagtagttattttaatttggttttttgagggaaaggagtgggtgtggttttgtaggattaggggtgtttttgatttttttaagatttaggtgaggttgagggtttttggtgtgttagtttgtgttgtggttgtggttgtggtggtgatttgggttgggttttgtttttgttggttttaggtttttgttttttttgtgtaggtagtgggtgtgtgtggtttgggttgggtaagttgaggaatagtgagtttttggatgttgattgtaggatgttttagtttgtgtttgggtttttgtttttttttgtatggggtttgtatttttgggtttgggtttgatttatagggtgttgaggtttttgtagttgaagttggaaggttttgttgtgagtgtggtataggttgttggtagtttttggattttggaggtttggttttttttttaagttgatggtggggaaagaattttgtttttatagtttttttgatttttgttgtttgttatttggggatgggaagtgtgtttgggttgttttatgtttttttgggttggagttttttttatggttggtttttttgggggtttttgggtttgtgagtagtgtttattttttttagagaagaatttttttttttttttattgaagtgtttttttttgtattttgaaataattttttttgggtgaggttagtttttttttgttgttttttttttgtaggtgtttgggagttttgtgaggattttgtgtagttgagtttaggtgataggtgtttttttaggtgtttatttgtttttttttaatttgtttagggaaagattagaatgatgtgtgtggggaggtggttttgttttttttgaaattggtgtttttgggtaaaattgtgtgttgtgtttatgtgggttttgttagtgtgtgtgttttagaagagtgggttttttaggtggtattttttggagaagtaagtgaggtgaatttagaatagagaagtgggaatgattgtttgatgtgttgagttggaaaaagagaggagagggagaggtttttagtgagtgtggagatagaggagtttatgtggtatagtatgagttttatttttgtttgtgtagaggtgtgtgtgtgtgtgtgtgtgtgtgtgtgtgtgtgtgtgtgtgtgtgtttttttttgtatttttgtgtttgaaataaaagtttaattaatggatttttggtgttttgaggatttatttttgggagtgattttgatgtattgttgtttaattagtgtttttaattggtgtttttggagataggtaggtttggagttgggatagagtttttttttgttttttttgtatattggaaaggtaaaatttataatatattgtggttattttttgggagagtgaaagagagtgggaggtagggaagaaagggagagatgtagttgtttgtagaggatggagtttttagttttgggggttgtggggaagggtttagattattgggtttgatttagttttttgtgtaagagggtttgggttggttgagttgttgaggattatgaatttgtttgtagaaaggtttagggagtttttattgtttgtataaatttattttatgtggtttattattttgttaataatggttgtttgttaataaggatgtggaggttaaataatttgggtggaagattaaatatgttttattaaggtgtttggaagttgtgtggtgtagagatttgtgttggagttgtttggtttattggagtttggagggagatgggagtatagtttgtaaggagttttggggtagaagaggaggtaaggtttagtttttttttttagggtgttttgttatgttaggataggtttaatttttttatatgttaaatagaaaatttatatagaagttagttttaatgaggtgtggaggttaaatttttggagtagttggttggagggtagatatggagtatttggggtttgaattaaaggtttttttttgaggaggggtggttattttttgttttttagtttttatatgttatgtatttggtaatttgtgtttatatgggattagtattggattagaagatagaagatgtggtttttagtttgggttttgtttttaaattattgtagaatttttattatattatttttttagttttatttttttattgtgtaagagaaaggagatggggtttgatgtagatgatgtatagtatttttttttttgtttagttttttattagagttagggaattgaatattttataagatgttttgttttttttaaattttgtaggatgtagttaaaaagaattttatttagtaaatatttgagggtttattttgtattagttatggtgtagtatgtattttttaattgagagtagaatattagtttatatttttttgttatttttaaatataatgttttataataaaagatgaaagagaaagaattttaaagagaatagaataggatgggtatgtatgtatagggtagagaaattatggaggtaaaggtaaaggtattgataaaagttgtgaagaatttgttgaattggtaaggaagttagtggataaatattgtagaagtagttttttaatagagatattatgtaggagagtagagagaaggtttttttttgaattttggtgatttggtagagaataaaagggtaagggttgtagaatttgattaggaggtttaagttgtatgtatttaatattgttaatttttggtttatatatttttttagtagttggaatttttttttttttttttttttttttttttttttttgagatggggttttgttttgttgtttaggttggagtgtagtggttttattaaggtttattgtagttttaaatttttaggtttaagtgatttttttattttagttttttgagtagtaagggttataggtatatgttattatgtttggataatttttttttttggttgaggggtatagatggggttttgttgtgttatttaggttggttttaagtttttaggtttaatgaatttttttattttggtgttttaaagtgttgagattataggaatgagttattgtgtttggtttaggaagtttattttttagttaattttgaaatattattttttgaatttattaattaggaaatttggttgttaggttgggattttttaagtttttgggtgatgggtatttagttttaaggaaggtaatgatgtttaaattattaaattatgttttagtttttgtgagttaggaatttagtgagtttagttgtgtgtttttggttttaggttattttattggggttgtggttttatttaaagatttagttgggtgaggatatgttttgggtttatttatgtggttgtttggtaggatttagttttttgttggtgggttatttggttgaaggttttagtttttttttggtggttggttagaggtttttttgttttttattatatgagtttttttatagggtagtttataaagtggtagttgtttttttttagattgagtaagtaagagtgagagtggaggggggagaaagtatttaagatagaagttatatttttttggttatttaattttggaagtgattttttattattatgttatattatatttgttagaagtgagttattagatttagtttatattaaaggaaaggggattatagaaggtattaaatttaggaggtagggattattggggattgttttagaggttgttgtttagattttttttatataatagttttgaggtttatatggt

SEQ ID NO: 42 - DNA, 5332 bp, Artificial Sequence
  chemically treated genomic DNA (Homo sapiens)
attatataagttttagagttgttatataaaaggggtttgggtagtagtttttaagatagtttttagtgatttttgttttttggatttgatgttttttgtaatttttttttttttagtgtgggttggatttagtgatttatttttaataaatataatatggtatagtgatggaaagttatttttaagattagatgattaaaagagtgtagtttttgttttgggtgtttttttttttttttatttttatttttgtttatttagtttgaggaaagatagttgttattttataagttattttatagagaggtttatatggtaaggaatagagaaatttttggttaattattaagaaggaattgaggtttttagttaaatagtttattagtaaggaattgaattttgttaaataattatatgagtgagtttggaatatatttttatttagttgagtttttagataagattataattttagtggaatagtttggagttagggatatatagttaagtttattagatttttgatttatagaaattgagatatggtttagtgatttaagtattattgttttttttgaggttaaatgtttattatttagaagtttgaagagttttagtttagtagttgagttttttgattggtggatttagaaagtaatgttttaaaattagttaaagagtaaattttttaggttgggtatagtggtttatttttgtaattttaatattttgggatattagggtgggagggtttattgagtttagaagtttgagattagtttgggtaatatagtaagattttatttgtattttttaattaaaaaaaaaaattatttaggtatggtggtatatgtttgtggtttttgttatttgggagattgagatgagaggattatttgagtttgggagtttaaggttgtagtgagttttgatggggttattgtattttagtttgagtaatagagtaagattttattttaaaaagaaaaagagagagagagagagagagagaaattttaattattgaaagaatatataaattaaaaattggtaatattagatgtatataatttgggttttttagttaaattttgtaatttttatttttttgttttttgttaaattattaggatttaggaggggattttttttttatttttttatatagtatttttgttaaggagttatttttgtagtatttatttattgatttttttgttagtttaataagttttttatagtttttgttaatgtttttatttttatttttatagtttttttattttgtatatatatatttattttattttattttttttgaagtttttttttttttattttttgttataaaatattatatttgagaataataggggaatatgaattgatattttgtttttagttaaaaaatatatattgtattatgattggtgtagagtaggtttttagatatttgttaaataaaattttttttgattgtattttgtaaggtttaggggagatagagtattttataaggtgtttagttttttaattttggtgggaagttggataaaagaagaaatgttgtatattatttatattaagttttatttttttttttttatatagtagaaaaatgaagttgggagaataatgtaataaaaattttatagtgatttaggggtagaatttagattagaaattatattttttgttttttaatttaatgttaattttatgtaggtataaattgttagatgtatgatatgtaaggattgggaggtaggggatggttatttttttttaaaagggggtttttggtttagattttagatgttttatgtttgttttttagttaattattttgagggtttgatttttatattttattggggttgatttttatgtggattttttgtttgatatgtggaagagttagatttgttttggtatagtaggatattttgaagagggagattagattttgtttttttttttattttggggttttttgtagattgtgtttttatttttttttaggttttagtgagttaggtggttttagtgtaggtttttgtattgtgtggtttttaagtgttttgatgagatgtgtttaattttttatttggattatttaatttttgtatttttgttaataaatagttattattaatgagatggtagattatatggggtgggtttgtatagataatgagagttttttaggtttttttgtgagtaaatttataatttttagtgatttagttggtttgaatttttttatatagaaaattgagttgaatttggtggtttgggtttttttttatgatttttggggttggaggttttgttttttgtaaatagttgtattttttttttttttttttgttttttatttttttttgtttttttaaggggtggttatagtgtgttataaattttatttttttagtgtgtaggagaggtgagaggaggttttgttttagttttgggtttgtttgtttttgaggatattaattaaaggtattaattggatagtaatatattaaagttgtttttgggagtgagtttttagagtattaggaatttgttagttgggtttttgttttaaatatagaaatatagaggaaaatatatatatatatatatatatatatatatatatatatatatatatatttttatgtgggtaagagtagggtttgtgttgtgttgtgtgggtttttttgtttttgtgtttgttgggagttttttttttttttttttttttttggtttggtatattaaatgattgtttttgtttttttgttttgagtttattttatttatttttttaaagagtgttgtttagaaggtttatttttttgggatatgtatattaatagagtttgtgtagatgtggtatgtggttttatttaagagtgttagttttgggagaaataaaattatttttttgtgtatattgttttggtttttttttaaataggttgagggagggtaagtagatatttggggaggtatttgttgtttggatttaattgtatggggtttttatgaggtttttggatgtttgtgggaggagggtgatagaggggaattggttttatttaggaggggttattttaggatatagaaagggatattttgatgggggaaggaaaggatttttttttgagggaagtagatgttgtttataggtttaagggtttttagaggagttagttatggaaagggttttggtttagagggatgtgaagtgatttgggtgtgttttttgtttttaaatggtaagtggtgggggttggggaagttgtggaaatgaggttttttttttgttattggtttagaaggaaggttaagtttttagagtttagaagttattagtaatttgtgttgtgtttgtaatgaggttttttgattttagttataaaggttttagtgttttgtgggttagatttaggtttgggggtatgagttttgtatggggagggatggagatttgggtataaattgggatgttttgtagttagtgtttgggggtttgttgttttttggtttgtttagtttgggttatatgtgtttgttgtttgtgtgagggaggtgggaatttgaagttggtgagagtgaggtttggtttgagttgttattgtagttatagttatggtgtaggttggtgtgttggggatttttggttttatttgggttttggggaggttagaagtgtttttaattttatagggttatgtttgttttttttttttggggagttagattggaatggttgtttttgattttatttgttattaattttggtatttgttttttattttataaatgtttttttttaagtaattgtttttgttaatagtgtatattttttagtagtgtttattgtgttataaataattttgatgaagatgtaaggatatgatttttataagattggataattgatttaatttgtgatttgtgatggtgaataatattggaaggttatttaaatagatgaaggtttaaattgttttgtttgtatttgaattaattttttatttattattattatgaagtgattggtttatttaagttttttagtttgttggaatggaatgggatttaaatgagattgtaatataatttaaatgtttgttgattttaatgaggttaattgagtagttgtaataaatataaatatttttttaaatagttgtgttttaaattattatttaatgtttttatgtttttttaagtggtagttttttttttttttttgtttttgtttagaatattatatatttatttgttgaaaaggtgattttggaaataattttgtgtttttgtttgttttgtagatagtaggatatgttttgtgattgggttttgttttgttttgttttgttttgttttttttttagagttaatatttttagggttttttaagttggtataaatggtgagttgagttttagttttattttaaagtagttttttgtgttgtttttgtagagtttgggaggagttgagtgatggaagaaatttgttgtttggatttagttatttatttagatgtagtttagttgggttttgtaaatgaatttgtgttattgtatttataaatgatattttgaagagtggtattgtttttgatttgtattgatgattgttattattttgaataaattagaattttaatatattttaaaggtattttttagaaagtttaatttgttggtagtttggttttttgtaaattaaaaggagtaggtggaggttgattgaggatttttttattagggaaggggtatagaaagagaattttgttataataaatggtggtaggatggtggaggagggggttgataattagagaaatgttaattttgtggttttaatttttttttttttttatttgtaattttatttttatttttttttttattatttttgggtgatgatgtatggagaggatgttaagatttttattttgagaatgttatttgtttggatatttttggtggtaattgtttattgtgatatttatgtttattttttggtggatatatggtggttggtgtttttgtagttggggaataatggaagtaattaagtgggagaagtttgaggaataaaagaattttttaaattttagtgaaagggttggggttggggatgtggggggatatttgatttattgtgaggatttgagtttaattttggggtgattgtttaaggttatgttttttttgaaaggtttagggtaaggagatgtattttgaatttttttttttttaatttttggttgagggagagggattttttgtttggagagtgtgggtgtagggtttgaaattag

SEQ ID NO: 43 - DNA, 4215 bp, Artificial Sequence
  chemically treated genomic DNA (Homo sapiens)
ggtgtttgattaagtgtagtttgtagtttgggtattgttaattgattttaattttttttatggtgagaggatggattttttgttatttttttgtttaatttggtatttatttatttatttatttattatgtttgttgggtgtatttaagtttaattttggggtgtatgtgttagtgtagatattgtattttttttttttttttggttaattttaggtagaattttaaaataattgtttttttttttatgatttagatgttgtggtttgtggataggaggtttaagaaatagtatattttgagtggtaggtagtgaggtggaaatggttgttggttttagtggtggttttattggaagttgagtttaggagtggttaagtggttgttggggaaagtattggggttttttagggttttttttgagtttttattttgtatttttgagggtgtgaaaattatgggagttgttttattttgtgtgtttagttttgttttagtttagatattgttttttgttagttttttttgtggtgtttagggaggatgtgttttgtttttttttaatttggttaatgggtgtttgggtagtgtgtggtttgtttttgtttttgttagggaaatttggaggaggagaaaagtttgtatagagggtggaaaggtgagagtggagttttaagtttggtagtttgagaggaagatgaatagttttaggttagagtttttggtagagtggattttgagttgtttttaggtagttaggagtggttttagtggtagttgtaaattttagtagttgtttgtgttgtttgtggttggggtggagggtagttagagttggggattaaggttttgtgttatttgtgtgtatagttttatatttgaatgttgtttttttgtagatgagattggtgggtattgtaaagttgggatttgtttttgaaggaaaaaaaatagtgagtaagaaatttagtattattttttattgatttattttgttgtattttttgttttttaagtttttgaaagttggtaattttgattttggtgtttaaaaattgatagttattgagattggttttgagaagttgaagatttggtagtttttagattgagtaggataaggtgaaagtaggttggaggtgggtttaggatatttgagggttgattttgggggtttgtgaggttgttattgttgttgttgttataggtgagatggtgttgggttgatgttggggttaatgggtagagaatgtagggatgtggtttttgttgaagagagttaagaagggaagagtgtgttttttaaattgtttttgtaatttgtttttagtgagtattttattgatttagaatttattgagaatagtattagtgagttattttttttttgagatgggttttatttattttggtaatggagtgagttggattgtggggaggaagaggaatgggaaaattagtttataaatattaatgttagtaagagtgtgttgttggtaggatgtattgtgagtttggagattttggtggttgtagttggtaagtggttataatttagaaagtaggattgagttgttttttttgttttattagtgtattgttttttgggtgtgggtttaatattttataagtggtaatttttgtttatggtagttttgttttttttttattatttttagatttagttttgtattttaaggttgtgtattgttagttattattatgtttatttttggggttaatttgtttgtttttttgagttttgattggttgaatagtttagtgattattttggtggtgatgtttatttttggggtggtgggtaatttggtggttattgtggtgttgtgtaagttgtgtaaggagtagaaggagatgattttttatatgttggtatgtgggttggttgttattgatttgttgggtattttgttggtgagtttggtgattattgttatgtatatgaagggttaatggtttgggggttagttgttgtgtgagtatagtatttttattttgtttttttttagtttgtttggttttagtattatttgtgttatgagtgttgagtgttatttggttattaattatgtttatttttatagttattatgtggataagtgattggtgggttttatgttttttgtagtttatgtgtttaatgtgtttttttgtgtgttgtttaatatgggttttggtagtttgtggttgtagtatttagatatttggtgttttattgattggattattaatgtgatggtgtatgttgtttatttttatatgtatgtgggttttagttttttttttatttttgttattgttttttgtaatgtgtttgtgtgtggtgtgttgttttgtatgtattgttagtttatgtgttgtattttgttgggtattgagtagtattatgtggttgtggttgttttggttgttttttggggttattttgttgtttttttagttttgttgtgttttagtgatttttggtgttgttggagtttttgttgtattgtgggtgttgagatttagatggttattttatttattgttatttttttggtggtgtttatttgttttattttgtttgtggtgagtgattggggttggggttttatttggttttttttttgtatttattttttgtgtttattttttgttttttgttttttttttgagtttttggtagtgaatgtgttgtttttaggttggggttgggatttttatattgttttttagagtaggtttaattttttttgaagttttaattttaatgagatttagtaggtgttttgtttttatattttttagtttatgtttttggaagtttgggtttttttttttattgagatagtttttattttttgttgtttgatattggttgagttttttaagaaaattttttgttttttttgttagatgtggaggggagtttgttgtagtgtgatttagtttatttttttgtattgtgaattgtgaattgtaaaatttgaaatgttagggatggtgatttgtttgttgtaaattatttttaaggaaagtggggtttttggtgttttgatgtatgtaaggttttttgaatttttttttttgtggattgtgtagaattttaaagttagaagagatattaagaggtgttttagtttaatttttttattttattgagggagtgaatgatatgtttaaaataatttagttgaatttatatagttaagttaggttttttgttttttattatggtgtgttttgggagggtagtttaaagtatataaattttaatttatatatagggtagggtttagatttagttttttttattttgtttagattaggaaagtaaagttttttagggtgattaattatggataggttgatatatatagggtatgggatttgaatttttgataattgtgtgaggtatagtattattttagagaaattgaggtttagagatggttgtttttgtttttttaagttaaagttttatagtttgtaatggattttaggttgtttgaggttagatttagtttatgtgttattatattatgttttttttgtagaatattttttattttggtgtttgtaaagtgtgggttggagttttggtatattttatttttagtttattttttaagaattgtttttggattaatttttaaaatatgataaatagaaaggtttaaattttatttagttttttattttgtttgtggttaaaatggaatgtattagaagtagatgggtagaataatgtaatattttatttagagttttttttgaaagtaattagttatgagtttttttattttttaaaatattgtatttttggaaattttaaattattaatttaaaaagagataattgtttttttttatgtttgttgggaataagagaatataaaatgtaatgggttattattttttttttttttttattgatattgtttagggatttttggtgtaaaaatatatttttgataaaagtgattgtaaatggaaggaatttagagggggtttagagttagaatatagtaggtttttattaatttgtataaatagaagtaaatataataggttataagagtttttaagttattttaggatttaatataatttatagagttaagttatatttgagttatataaatatattttattgtttgtaatggtaatttagaataaagtgagattttggaagaaataatattgtttttgatggg

SEQ ID NO: 44 - DNA, 4215 bp, Artificial Sequence
  chemically treated genomic DNA (Homo sapiens)
tttattaggagtagtgttgttttttttaaaattttattttattttaggttgttattatagatagtaaaatatatttatgtggtttaagtgtgatttaattttgtaaattatattgggttttggaatggtttaaaggtttttatggtttattatatttatttttgtttatataaattggtaagaatttattgtattttggttttgagttttttttaagttttttttatttatagttatttttattaaagatatatttttatattaaagatttttggatagtattaataaggaaaaggaaggaataatagtttattatattttatatttttttgtttttaataagtataagaaaaagtagttatttttttttgagttggtagtttagaatttttaggaatgtagtgttttggaagatggaagaatttataattagttgtttttaagagaaattttagataaagtattgtattattttgtttatttgtttttggtgtattttattttagttataggtaaagtagaaaattaggtagggtttgagtttttttgtttattatattttaaaagttaatttaaaggtaatttttaaaagatgaattaaaaatgaagtgtattaaaattttaatttatgttttataaatgttaaaatgagaaatgttttatgagggagatgtgatgtaataatatatgagttgggtttggttttagatggtttaaggtttattataagttgtagagttttggtttgaagaaataaagatagttatttttaaattttggtttttttaaaatggtattgtattttgtatagttgttgagaatttaaattttatattttatgtatattagtttgtttataattagttattttgagaaattttgtttttttggtttagatagaatgaaagaaattgagtttggattttgttttgtatatgaattagaatttgtgtgttttaagttgtttttttagggtatattatggtaaagagtagggagtttagtttgattgtgtaggtttggttggattattttaagtgtattatttatttttttagtgaagtgagggagttagattaaaatattttttgatattttttttagttttaaaattttatgtaatttatgggggaagaaatttaagaaattttgtatatattaaaatattaaaaattttattttttttaaaaatggtttataatgaatagattattatttttgatattttaggttttgtagtttatagtttatagtatggaggaatgggttaagttatattatagtaggtttttttttatgtttaatagagggggtggggggtttttttggaagatttggttagtgttaggtagtaaggggtaagggttgttttggtggagaaagaaatttaggtttttgggaatataaattgggggatgtaggggtaaagtatttgttaaattttgttagggttgggattttaaagagggttgggtttgttttgagaaatagtgtgggaattttagttttgatttaaaggtgatatgtttattgttaaggatttagagggaaagtagggagtggggaatggatgtgggaggtggatgtgagaaaaaggttgagtagggttttagttttggttatttattatgagtgggatggagtagatgagtattattagggaggtggtaatgagtaagatgattatttggattttggtgtttgtgatgtggtggaagttttggtggtgttgaaagttgttgaggtgtggtaaggttggggaggtagtggggtggttttgggaggtaattgaggtggttgtggttgtgtggtgttgtttggtgtttagtgaggtgtggtgtatgaattggtggtgtatgtggagtagtgtgttgtatataagtatgttgtagaggatggtggtgagaatgaggaaggagttgaagtttgtgtatatgtaggagtaggtggtgtgtgttgttatgttggtggtttagttgatgaagtattaggtgtttgggtattgtagttgtgagttattgagatttatgttgggtagtgtgtaaaagagtatgttggatgtatagattgtaaagagtgtgaggtttgttaattgtttgtttatgtagtggttgtagaaataggtatggttgatggttaggtagtgtttgatatttatggtgtagatgatgttgaggttggataggttgaagaagagtagaatgaaggtgttgtatttgtatagtggttggtttttgggttattggttttttatgtatgtggtgatggttattgggtttattaataaagtgtttaataggttggtgatagttagtttatatattagtgtgtagaaggttgtttttttttgttttttgtgtgatttgtatagtattatgatggttattaggttgtttattattttgaagatgaatattattgttgggatggttattgggttgtttagttggttggggtttaaggaggtggatgaattgattttgggagtggatatgatagtggttggtggtgtgtagttttggagtgtaaggttgggtttggggatggtagaagagagataaagttgttgtgagtggaaattattatttgtaaggtgttagatttgtgtttgagaaatgatatattgataagataaggggagtaatttgattttattttttggattgtagttatttattaattgtggttattaaaatttttaggtttgtgatatgttttgttaatagtatatttttgttgatattaatatttataaattgatttttttatttttttttttttttataatttaatttattttattgttaagatgaataagatttattttaagggaaaagtagtttgttagtgttatttttgatagattttgaattaataaaatgtttattgaaaataagttataaaagtaatttggagagtgtgtttttttttttttggttttttttggtgagggttgtatttttgtgttttttatttgttgattttaatgttagtttaatgttattttatttgtagtggtagtagtggtggtagttttatgagtttttagggttagtttttagatgttttggatttgtttttaatttgtttttattttgttttgtttagtttggaaattgttaaatttttggttttttaaagttggttttagtggttgttgatttttggatattgaggttagagttgttagtttttaaaaatttgggaaataagaggtgtagtgggatgggttagtgaagaatggtgttggattttttatttgttatttttttttttttaaagatgagttttagttttgtagtgtttgttggttttgtttgtgggaggatagtgtttaggtgtgaggttgtgtgtgtaggtggtgtggagttttggtttttagttttggttgttttttgttttagttatgggtagtatgggtggttattggagtttgtggttgttgttgaggttgtttttggttatttgggggtggtttggggtttattttgttagaggttttggtttggggttgtttattttttttttgggttgttgggtttggagttttgtttttgtttttttattttttgtataaatttttttttttttttaagtttttttggtggaggtggaggtaaattgtgtgttgtttgggtgtttattggttggattggaagggggtggagtgtgttttttttgggtgttgtagggaagattggtggggggtggtgtttgggttggggtggggttgggtgtgtggggtggggtggtttttgtggtttttatgtttttggaggtgtggagtgggaatttggaggggattttgggaagttttggtgttttttttggtgattgtttagttgtttttgaatttggtttttagtggggttattattgaaattggtgattgtttttgttttgttgtttgttgtttggagtgtattattttttgaattttttgtttgtgggttgtaatatttagattgtggaagagagggtagttgttttaggattttatttagggttggttgagaaaggagaagaaatatggtgtttgtgttagtgtgtgtgttttggggttagatttgggtgtgtttagtggatgtggtaggtgggtgggtgggtgggtattagattgggtggggaaataatgaagaatttatttttttattataaaaggagttggagttagttggtagtgtttagattgtgggttgtgtttggttgggtatt

SEQ ID NO: 45 - DNA, 5473 bp, Artificial Sequence
  chemically treated genomic DNA (Homo sapiens)
gtaatgttaattagttttattttaaagaaaaattaaatattagagtaaataatgatttttttgtggagaaggagttgtaagggttggggagaggtaattagtgttataaaagttttattataaagaagtttagaatttttttgttttgttgtgtagtagagtgaaatatagtagtagaataattgtgtattattattatgataatttaatttgtttttttagaaaaagttattgtttgtagttaggatagtaggaaaatatttagaaaataattaaaatgtaaataaaagtatgaaataataataaagtttattttttaagagaaaaaaagaagagtatttagtgaaaggagaatgaagtatatataaagtaagtaatttttaggtattttgtttttttggatgttatttgtttaaatttgataatttttataggtagtatgatagattttttaaaatttaaataaagtttgtttttgtattttatttttaataataaagtatattgattgatttataaattaaagtttttaaaattttattaaagtaaaaatattgttttagagtttttattggtatgtttttgaaagtaagtgttatagttaatgtaaatttttaaaaatttttttgttatttagtataatagagggtggattttgtgttagggtggtattttttgtgtaatttatatggtttgaggttttttgttttttttttttttagaagagttggaattaagatattaataattataattgtaataattattattatgtttttaaggggttgttgagtttttggagattttagtgtatagagtgaagtaggagaggtttaaaaaggaaggttttgttgttgatgttgtgatgattaaggtagtttattattattttttttttttaatgtgattgttttgttttttttttttttgattttgttataagatgtggggaagttttttaagaattgtgtatagtttgttatagatggtggtttttgtgtttagagattgaaagagtatttgttatagtgatattttgtaatagttgtagatgtgtgggtttaaaattgttttatgtgtttaaattaataataattattattttattttattttattatttgagtggaaatataatttgaaatatttaaatttgttttttttaaagttagaaggatatgtgtatgtgaatgtatataatttgtttttttaaatgtttttaaagtttatttttgttattatatttgtttttataattaataaagaaaatttgttttagttttaattttattgggtatggtatgtgttggagggtaggttttggaaatataaatattaatatatgtggtttgttttaaaatttaatgtatttagggttagttttgttgttttggttaaatgaatgaataaagagtgattaaaatgtgtttatttttttgttattttatatatagtttgagattgattgttaatagtagattgtaaatttttgtatttaatagttattaattttttttatagtttgtatatttataaatttaattgggatatttgtttgataaatttagattttgtagagtagatttttaaggaaatttaattttagagaataaaatattttttggaatttttaaggtatttagagataaaatgttttttgtgggatttttttttaagttttataaaagtaggtttattaggattaaattatattaaagttagtgtgaggtaaggggggtgtggtttatagaaattttgggagaaagtttagtatagttttttttttttgggaatatatgttaggatggaaaaaaaaaaaaggaggggagtgttataggattaagatttattttggaaaataagatttttagtaaagatattttttttttttttattttatattagatattagaagtattattttttgagtgtgttttttaagtttttttttaattttaggttttttttgttttttgggtttttgattttttggtagttgggtatttgtatttgggtttttgataggtttagttgttggtttagttttttttgtatgaaggtgttgggatagtgggttttgttaaaaagtttttttagtttattgagttgttttagggtgaaattggtttgattttgtttttgtttgattttggtttggtttttgttttttattttttttgtattttttttgtgattttttagttttggggatattggagggggtattttagtggggttatatgtgtatttatatgaatatatatatatatgtatatatatatggatgaaaatagtatagtaaattttgttattagatttgttgtaaaaaagaatagagaattttttttttttgtggaattttggtttggttttttaatttatttggaggaagaatattttggagaagtgtaaaggttaagtttgagtggttgtttggggtaaggtgggtagttatttattattttttttataaatgtattttgatttattgttttattatttattttttagttattggttttttttagtaaatattaaatggtttttatttatttttgtatttatttgttttgtagtatttatagaaattaaaggtgtagtgttaggttttttatagagtaaagtttggatataagggtgtggtaaggttatttattggttttttatattggttatttttagaaggttggtttgtttttaggttagtttttattattgttggttttttgtttattgtaaatttgttggtttaatttaggaataattgggttgaaaggtattagtgagagtaatagattttggtgttgtgttgtatagggagttgtatttgtagatgttttttgttgtttttgggtttgggttaaattttgtataaggttttttggatagttaggtaatttttgttttgtttgtttgattggggttgtatgagtataggtgtttatgttatgttggttgtttaaagggtttgttgtttaagttgggttagaaggtaggaggtggaaaattagtttttggtggtgggtgaaagtaattgttttttttgttttttttttgtttttttttgtggaaatgtagatttgattttaaatgtttaatttatagagattaataggtttaagtggaatatttgtgatttttggtttttattggttgtttaaagtttttttatgtaattagtagtttggatgtttaataaaatatgaatttttttgttttgggtttgtatatatttgttgttatttttttgttttttttttttttttaaaaataggagtttttttagtgtgagtatatatagttattatatatatatttttttggaatttttattttttgtgtttgaattagagattttgggttttaagaagttaaagttgagtttagatagttgaggttgtttgtagttttttttagtgtaggatttaggttagtatgggtgttaaaaattatttttggaagagttggtttgtagagaaattaatatttgttttgagtttggaaattaataattttaggaattgtgtttgttgggggtttagatttgaattttgttgttaggtgtgttggtgaatttgtagtttgggtttgtagttgtggatttatggttgggaggttgtattgggtattttgatggtaattttattattttataaatttaggaagatttggtgttggtttggaggaagaagagttgttagattttggttttgttgggtattttagttatggtgattttaaatattgttgtattttttagtttttagagttagttttgtggatatttgttttttttttaggaaggaatattatagtaaatattatgggttaatttaatagtaaagtatttttattgatattgtattgaaatttaaatatgaaaatatattttttaaattttgttaatgaggtgggaaggttttgtttattatatgttatttatatagtggatgttatttaaagttttggggttttgaggagatgtttaaattttaagttgatttatagatttaataaaatttttatttttgtttttaaatttttaattattgatttaaataggaatagattgtgttataaataatttaattgtttgtttaaatatgtgattttatgtatgttatatatttttttaattggaaaaatatggtagtatattagttattgtaggtattaagtgttaaattaattttattgttgaatttttttgaattggtatagaatgttttgttattgagataaagatgttttttaatattgagttagtattaaaggatttttgttttaagagaattgagtattgggtgattgaaaatattaaaggaattgtgtaaatatagatttttattttttttgttgttttttttttttgtttttaatatattaagaaattgaaatgttttgtttgggagaagtagtgtagtttggattttagtttttgttggtttttttttattttgaaagagaatgggaagttttggtttttaagatttaaagatttaggggttttgtggagtttgaggggttttggtggttttaaatatttaggtgattggagggttaagttttttatttttgtttttttttttttttggtaaattttgtgttagaggttagttttagttttgttgtttggtttagtatttttttttgtagtttggttttgtgaatttttatgtttgtttgtgggttatttgggttgtgggtttatttttttgttggtgaaaaatgtattttggtggaatgggaatatttgggaagggtgtgtataaattttatatgtttttttttatgttatttttataatatattaggattttatttatgattgagtatattattggatttttatttttttattattattttagttgataaagttggggtttagggttttttttgtgttttttttttttttttgttgggttttggagtttttttttgtttgagaggagtttggaaggtgggaaggggaattgttgttgggggttagttaggttgttattttttgttagttgtgggttgtttggttttttgttttttttggtggtgtttatgtttagtttttggatgggagagtgtttttttttagtttttttgtttgttttttttttttttatattttttttgttttttttgttgttgtttttgttttttttgttgttgtttttgttggttgtttggattgttgggttgttgtggttgttgtggtttgttttggtgtagttggttggttttttggttttgtgtagtggtttgttttttagtattttttggtatgtgattgtttttttttttttttttattttttggttaaaagatttggagatgaatgttgtaagtttttttattgttgttgtatgttagtttggtgtttaatttttgttagtagagttttgtttttttttttttttttttttttttattgttttagtttttttaataataatatattaatgggataggaggtgggg

SEQ ID NO: 46 - DNA, 5473 bp, Artificial Sequence
  chemically treated genomic DNA (Homo sapiens)
ttttattttttgttttattgatgtgttattattgggggggttggagtagtaaaaaaagaagaaggaaaaaaagagtggggttttgttggtagaggttgagtgttgggttgatgtgtggtggtgatggaagaatttatggtgtttgtttttaagttttttgattagaaagtgaaggagaagaaggaggtgattatgtattgggaggtgttggagagtgggttgttgtgtggggttaaggagttgattggttgtattgaggtgggttgtgatgattgtagtagtttggtagtttgggtggttggtggaggtggtggtggaggaggtggaggtggtggtggaggaggtggaggaggtgtaggaggaggaggagtaggtggaggagttggaggagggtgtttttttgtttgggagttggatatgggtgttgttgagagaagtagggagttgggtagtttgtgattgatggagggtaatgatttgattgatttttggtagtggtttttttttttgttttttggattttttttgggtgggagaggattttgaggtttagtggggaggggagagggatatggagagggttttggattttagttttgttagttagagtgatagtggaagggtgggggtttggtggtatgtttggttatgggtggggttttagtgtgttgtgggggtggtgtggggggaagtgtgtggggtttgtgtgtgttttttttagatgtttttattttattgaaatgtattttttattagtgggaggatgggtttgtagtttggatggtttgtaggtggatgtggaagtttgtggggttgggttgtaggagggggtgttgaattagatggtgggattaaagttagtttttagtgtagagtttgttgggagggagaaggggtagaggtggaaagtttaattttttggttgtttaggtgtttggggttgttaagattttttgaattttgtagagtttttgaatttttggattttaggggttaaaattttttatttttttttaaggtagaaggaagttaatgaaagttgaggtttaggttatgttgttttttttgggtgaggtgttttggttttttggtgtgttgggggtggggggggggggtggtgggggaggtggggatttatatttatataatttttttagtgtttttaattatttagtatttggtttttttagagtaaaaattttttggtgttagtttagtgttaggaaatgtttttattttaatggtagagtgttttatattaatttaaaggagtttaataataaaattgatttggtatttggtgtttgtagtaattggtgtattgttatatttttttaattaagaaaatatgtggtatgtgtggaattatatatttaagtaagtaattaagttgtttatgatatggtttgtttttgtttagattagtaattggaaatttggggataaaaatagagattttattaagtttatggattaatttgaaatttggatatttttttgaagttttaaaattttgagtggtatttattgtgtagatgatatgtaatagataaagtttttttattttattggtagaatttgaagggtgtgtttttatatttaaattttaatataatattagtaaaaatattttgttattaaattggtttataatgtttattataatgtttttttttaaagaaaggataaatgtttataaaattaattttgagaattagaaaatatggtaatatttaagattattgtagttagaatgtttggtagggttgagatttagtgatttttttttttttaaattagtattaggtttttttaaatttgtaaagtggtggagttattgttaaggtgtttagtgtagttttttggttatgagtttataattataggtttgaattataggtttgttagtgtgtttgatggtgaggtttaggtttgaatttttggtgggtgtagtttttgggattgttgatttttaagtttagggtaagtattaatttttttgtagattggtttttttggaaatgatttttaatatttatgttggtttggattttgtgttgggaagaattgtaaatagttttgattatttaaatttagttttgattttttaaaatttggagtttttgatttgggtgtagaggataaaggttttagggggatatatatatggtggttgtatatgtttatattagaagagtttttgtttttaaagggaggagaaggataggaaagtggtaatggatgtgtgtaaatttagagtagaaaaatttatattttattaaatatttgagttgttggttgtatgaaaaggttttgagtaattaatagaaattgaggattgtgaatattttgtttgaatttgttgatttttgtgggttaagtgtttagggttgagtttgtgtttttatgagggagggtgaagagagaatagaaagagtggttgtttttgtttgttattggaggttggttttttgttttttgttttttggtttggtttgggtggtgagttttttgggtagttaatatggtgtgggtgtttgtgtttgtgtgattttggttgggtaggtgggatggagattatttggttgtttaggggattttatgtagggtttggtttgagtttaggggtagtgaggggtgtttgtggatgtggttttttgtgtggtataatattggggtttgttgtttttgttgatattttttggtttaattgtttttaaattagattagtaagtttgtggtaggtagagagttagtggtggtgagagttggtttgagaatgagttagttttttgggaatggttggtgtgagaggttagtgggtggttttgttgtgtttttatgtttagattttgttttgtgagaggtttggtgttgtgtttttgatttttgtgagtgttgtggagtaagtgagtgtgaaagtgagtggaaattatttggtgtttgttggggaaggttggtgattggggggtgaatagtgaggtggtgagttgaggtatgtttgtgaaggaggtggtggatgattgtttattttgttttaggtggttgtttagatttgatttttgtgtttttttgggatattttttttttgggtgggttgagaagttggattaggattttatgagggggaaggattttttatttttttttgtgataaatttggtaataggatttgttgtgttgtttttgtttgtgtgtgtgtgtgtgtgtgtgtgtgtttgtgtggatgtatgtgtggttttgttggggtgttttttttagtgtttttggagttgaaagattgtaaagaggatgtgaaagggatggaggatgaaggttagattaaaattaagtagaggtgaagttggattaattttattttggaataatttaatgagttggagaggttttttgatgagatttattattttgatgtttttatgtgagaggaattgagttagtgattgggtttgttggaggtttgagtgtaggtatttagttgttaggaggttgagggtttagggagtagagagagtttggggttggaaagaggtttgggggatatatttgggaggtggtgtttttagtgtttggtgtaagatgagaaggaaagagatatttttattagaggttttattttttaaagtagattttagttttatagtatttttttttttttttttttttttattttaatatatgtttttagaagaagaaagttgtgttgggtttttttttagagtttttataaattatattttttttgttttgtattggttttaatgtggtttaattttaatgggtttatttttataaggtttaaaaaaaaattttatagaaaatgttttatttttggatgttttaaaagttttaaagagtattttgttttttggagttggatttttttgaaagtttgttttgtagggtttaggtttgttaagtggatattttaattaggtttatagatgtgtagattataaagaaaattagtaattgttaagtgtagaaatttatagtttgttgttagtggttgattttaaattgtgtgtgaaatagtggagaaataaatgtattttggttattttttgtttatttatttaattaaggtaatgaaattgattttaaatatattagattttaaaataaattatatatattagtatttatatttttaaagtttgttttttagtatgtgttatatttaatgaagttaggattgaaatagattttttttattggttgtggaggtaaatgtaatagtaaaaataggttttgggggtatttaaaggagtaaattgtgtatatttatatatatatatttttttagttttagggggaataaatttaaatgttttagattgtatttttgtttagataataaaatagaataaaatgatagttattattggtttgaatatatggagtagttttaggtttgtatatttgtagttgttataaagtattgttgtaatagatatttttttggtttttgggtatagagattattatttgtagtgaattatgtataatttttaaggggtttttttatattttgtaataggattaggaaaaaaaaaaatagagtagttatgttgaagaggaaaagtaataataggttgttttggttattatagtattagtagtagagtttttttttttaagttttttttgttttgttttgtgtattgagatttttagaggtttagtaattttttaaaaatatgatgataattattatagttatgattattagtattttaattttaatttttttaggggaaaaaaaggtaagaagttttaggttatgtgaattatataaaggatgttattttggtataaaatttattttttgttgtattaaatagtagagaaatttttgaagatttatattgattatgatatttgtttttaaaaatatattaatgaaagttttgaagtagtatttttattttaatggggttttaaaaattttaatttgtgagttaattaatatgttttattattgaaagtggaatataaaagtaagttttatttgaattttaaaaaatttgttatattgtttgtaaaagttgttaagtttaagtaggtaatatttaggagaataaagtatttaagagttatttgttttatatatattttattttttttttgttgagtgttttttttttttttttttaagaagtgaattttattgttgttttatatttttatttatattttagttattttttagatgtttttttattattttaattgtaaatagtggttttttttaaagaagtaaattagattattatgataatggtgtataattattttgttattgtgttttattttgttgtatagtagaatagagaaattttaaatttttttgtagtgaggtttttatgatattaattatttttttttaatttttataattttttttttgtaaaggagttattatttgttttggtgtttggtttttttttaagatgaagttaattaatattat

SEQ ID NO: 47 - DNA, 5328 bp, Artificial Sequence
  chemically treated genomic DNA (Homo sapiens)
ttgataagagaaaaggtgttgagggtaggttgtgttgttttatttatagtttattgtttgttgtagagtttttgttaggattggaaagttaatttagtgttgattaaaagtattatagagttaaaggattggtaatgattgttaattttattttagttttatgtatttttaattgttgtaattaaagatatgttatttaaatataggtgaagggttttttttttttaagttgggttgggggggggtgggtgggtggattataattttatttagattttttattttatttgggtgttatgtagttttaaattagattttattattattattatttagagttgttttttgttatttatatttggttttgtagaattggaagtgtgaaatgtgttatttatataaaagtttttgtttaaagaaagggtgggatgggggagtgtagaggagtaattatttaggggtgatttaaatatttaggtttttttttttttttttttaaattaatagaaaggtttttgatatagttaaaagtatttgaaattgggggtaaggttaataggttaaagggattagtgttagttttttaagtatttttaaaaagattatgtgaatagatggaaaaatatatttttaattaaataattttttttatattatagttgtagtgttggtttagaaattgtgtaattttttatttgataggagtttttttatgagaatattaaaggataaaaagttttgtatttttgtagttggttaaaattgataattatttttttatgtgtgtgtgtgtatatatatatatatatatatatatatatatatattaatatatatatatatatatatatatatatatatatatatatatatttttaaaaaagaatttagtttttaatttttttttatttatgaagattaaagttttgtatttgattttgtgagtggtttttgttttttggggttggaatttgatttagatgtgaagtggtattgagttgttgtgtaggtttgtgtttagtgttttttgttggatatagtaggagttgtgtagtgttagttttagaaattgttggaattttgttttggggttagagaaaatttttttattgttttttaaaaaagaaatgggatgtgaaaataaatttttatatttttgaaaaataatataatattaatttaataaaaaattaaagaggtgatattataattttaatttaataaaaaataaagattgttttttttatattttagttattttttatttggtttggttttgtaatttttttgaaaggttttgtgatggtaaaataggtaaagaaaagtgatgaaaaataaagtatttttttgtagttgtggagaattaagtaaagtatattttttttgttttgtttatattttaaaaaattaaatggaagatgttgttgtttgttgttttgatgttgttagtagtgttttgaatgtttttagaggttttgtaagtattgtaattgagtttttgagtaaatgaaataatttgtttttatgtgtttatttttagagtataattaaaagattagttttttttttgagtgttttttattttttagattaattttggttaaagttttttttttttagatattggttaagaaatatatattggttaagaaataggtgtttggtatttttttttttttattttagttgtaggattttggggaaggtgtgttaatggtagggaaggttttttttgaaatttagtattttgttgattaggaatttaaattattttagggaagggggagtatttttatatttttaaaaaattatttgtttatataataaagagttttgttttttttattattattattttttttttttttttttggttagtaagtgagggtaaaagtagtttttgaattattttagaaagagaaattgtaaaaatggtatattttttgaatttaaaataatagggaaatgtgggtttgtttaattgtttaaaattaaatagaaataattattgtgttaaatgaataagatgttttaagatttatatttttagggttatggttattgattttaattttatttttaagaagtttagagattgtgtttttaaagtttgtttattgatggaaattggtttaattttttataaaagaatggttttttaaaatattgaatattatggttatgtaaggtttatgatatttttatgtttattttttttattttttaaaattagtgaatttgagataatattttaaggggaattgttatttagtgtgatgagagatgatttttttatttggttttagaattagattttggtttaggttttttagtaagtaggtttagatgtaatggaaggagagaagaattaagttttttgataaaatttttattttgaattttatggaaaagataggtaagtgggattttagttatagtatttttattttttgttttattaaaaggtttgtttttattatagaaataatatagttggtgttagttttgtgaatttgtgttaattgataaggtaagaaatggtgtgttgatagttgaggtttgaaggttgtttagtggtttttgtagtttgtggggtagggaggttaaagttagtaaaatgttggaggtgatgttagaaagagagtatatgtttgttatttggaagtgatgttgaatgtgtaatagtagagttttggagatttttattttgttttgtatttagggattttagtttgtggggtagtaggttgttgggtgaaggtaggagggagaagttgtatttggttgagggtgggtgggtgtgttgggagtgagtgtttaattttttagggtttatggagaaagtataatttttagttgaggaaagagagttaaataagtgggtggtttaggtttgggaatgttatttagtttttttgatgtagtgttatttttgtggttttagggggttttagtatttgtttgaattttattttttaaggttgttagtaggaaggtagtttttttatttttgagggttgaggagggggtagtgagtgatttgattttttagtagtagggaaaattgtagtggttggtaatgggttgtgtttttttgtggtggtaaagtgttttttaggggtggggtgggtatttttggttttttgttttagtgtttaggtttgagtttgtgtgggttggttgggtgttttgttttgtaagtaattaattttgttggattttgaggattatttaggtggatgggtttatttagtttaggtttattgagattttgttaattttttagattttttttttttttattttttatattttttatgatgaatttaggaaagaatttgaattttgaaaaatagtatatgtggtttgaagtttgatagttatttgggtgtgagggatatgattttattaataaagattaagatttaaggttgagtttttatttattaaatttgtttttttattttgtttttaaattttggagattttttagttttgttgttttaattttgatatagataaaggtgttagggagaaagtttaggtgggtttgaagtagttgaggtatagattgatatttatttttttattatttagatgggtagataagtattgttagattgggggttttaatttagggtttagtggttatgtgggttgttgtggggtgttgaaattataagtataatttgatattattgagtttatggtgtttgttaataatttgtgaattaggtgtagagattgttattgtagattataatagtttttgaaggatttattatagtttattgtgttaatgatttttaaattaaggaggggaggtggggtgagatgaaaaaggagtggggagagttagtaaaaagggaagaagggtgggagggaagataaaagttagagttttagttttgaaggagtttttaaagattattaggttagtgatttgagaattttattgggatgggtttggaaatttaattttatttgagttaggattggaagaggggtgttgggggtaagtagaagtgggtttttgggaaggttgattttttaggtattttttttgaggttggaatagtttttgggagagggttttagatgttaatgggaggttttgaggatgttagtttgtttaggatgggtgtatattttgatttagagtattttttagggtaagttgtagttgtagatttttgaaaaaagtggtaatagttttgtttagggatgatggtgattgtaggatgattttttttttttaatggtttgttttaatttttttttatgttataggtgaaagttttttttttttttttttgatagtatttttgtttgttttttatatgttatgtagatttaatttttttttttaatttgtttttttgggtgttaaatatattagttttttgagattttattatttttgtggtttgtattgagtttaattgtaattttggaaagggaatttgtggataatatagtagtagtatgttttataagattttagaagaaagaagattaaattttatttatgtggtgtggtaggggttaggttaagggaaagaggttttttttgtttggtaaattgtttttgtagtgaaagggtagtttagtttttattggagtgttatttaatattggttagagaaaggttaaggaaagtgtaggtttgttttttttataaaagttgtggttataattaaatgaagtaattatagttggagaatttaaaataattgttttttttttaaaatgagggtaataattttagttattggaaaattgggattttaaggaaaatttttttttttggtataattaattgtataagatagtgtggttaattagagatatatgtatttagatttaagtaatgatttataggtgtaaaaggtttagtggttttttgggttatttggagtttttattgattattttgttttttaaaaaatttttttttaattttaaaaataaaagttatagatttaatgtaattgaaaattattgatggtagttttttaggtttttagtttatgtttttaaagggaatttatatttaaaataattaaattatttaatggttatattatatttttttttggataatagttgtagtgtagggatagaattttaatttatattaaaattgtttgataatttagaaatggaaatgaaattgtgaattaatttttttagaaaatatttgagttagaatataagaaggatgtttatatataatattgtaagtaatatgatgattattatatgtagtttgaaagatttatataaatgattatatattatttttgttgttataatttaaagtaaggg

SEQ ID NO: 48 - DNA, 5328 bp, Artificial Sequence
  chemically treated genomic DNA (Homo sapiens)
tttttattttaaattatagtaatagaagtagtatataattatttgtgtaggttttttaagttgtatataataattattatgttatttatagtattatatatgaatattttttttatattttagtttaaatattttttggagaaattaatttataattttatttttatttttgaattattaagtaattttaatgtaagttaagattttatttttgtattatagttgttgtttaggagaaaatgtagtgtgattattaaatgatttaattattttaaatataaattttttttaaaaatataaattgaaaatttgaagagttgttattagtggtttttagttgtattaaatttatgatttttatttttaaaattagaagaaaattttttaaaaggtaaaatgattagtaggaattttaggtagtttaaaaagttattggattttttatatttgtaaattattgtttgagtttaaatatatatgtttttgattgattatattattttatgtaattaattatattaaaggaaaaggttttttttagaattttaattttttagtggttagggttattatttttattttagagaaaaaatagttgttttaaattttttaattgtgattattttgtttagttgtgattataatttttgtgggaaaaataaatttatattttttttaatttttttttagttagtattaaatgatattttagtgaaggttgggttatttttttattgtaaggataatttattaagtagggaaaattttttttttttagtttggtttttgttatattgtataaatggaatttagtttttttttttttggaattttatggaatatattgttattgtgttatttataagttttttttttagaattatagttggatttaatataaattataaaagtgataaaattttagagggttgatgtgtttggtatttaaaaaaataagttggggaaagaaattagatttatgtaatatgtgagggatagataggaatattattagaggaaaaggaagaaagtttttatttgtggtatgaaaagaagttaaagtaaattattggaaaaaaaaagttattttataattattattatttttaaatgaaattattattattttttttaaagatttgtagttgtggtttgttttggaaagtgttttaaattaaagtgtatatttattttgggtgggttggtatttttaaggttttttattgatatttagaatttttttttaaaagttattttggttttaaaagaaatgtttgagaagttggtttttttaggggtttatttttgtttgtttttagtgttttttttttagttttggtttagatggagttgggtttttaaatttattttaatggaatttttagattgttggtttgataatttttaaaggtttttttggagttggggttttgatttttatttttttttttattttttttttttttttgttggttttttttattttttttttgttttgttttattttttttttttaatttgaagattattgatatgataggttgtaatgagttttttagaaattgttatgatttatagtgataatttttgtatttaatttatagattattgataagtattgtgggtttaatggtgttaagttgtatttgtggttttaatattttgtagtaatttatgtagttgttgggttttggattaggatttttagtttggtagtgtttatttgtttgtttgagtgatggagagatgagtattagtttatattttaattgttttaagtttgtttgggttttttttttggtgtttttgtttgtgttagggttggagtaatgaaattgaaagatttttagagtttgaaaatagagtgaaagagtaaatttaataaatgagagtttagttttgaattttagtttttattaatagagttatgttttttatatttaaataattattaaattttaaattatatgtattgttttttagagtttgggtttttttttgggtttattatgaaaggtgtgagggatgaaggggaaaagggtttgaggagttggtagggttttagtgggtttaagttaagtgggtttatttgtttggatagtttttagaatttagtaagattggttatttataaagtagggtgtttagttaatttgtgtgggtttaggtttggatgttgggataggagattaaaaatgtttgttttgtttttaaagggtgttttgttgttgtggagaaatgtggtttgttgttagttgttgtggttttttttgttattaaggaattaagttatttgttgttttttttttagtttttaaagatggaggggttgtttttttgttggtggttttggggagtgggatttgggtaggtgttggggttttttgggattatagaaataatattgtgttgggagagttgggtggtatttttaggtttgggttatttatttgtttagttttttttttttaattaggggttatgttttttttatgggttttagaaagttgggtatttgtttttggtatgtttatttgtttttagttaggtgtggttttttttttttgtttttatttaataatttgttattttataggttgggatttttgggtgtggaatggggtggaaatttttaggattttgttattgtatgtttgatattatttttgaatagtaggtatatattttttttttggtgttgtttttaatattttgttggttttggtttttttattttatgggttgtgggaattattgagtagtttttggattttggttgttagtgtattgttttttattttattggttggtgtgggtttataaaattagtattgattatattatttttgtaatggggataagttttttggtagagtaaaaggtgggggtgttgtggttggaattttgtttgtttgttttttttatagaatttggggtagagattttattaaaaggtttgatttttttttttttttattgtatttgaatttatttattaaaaaatttaagttgagatttaattttggaattagatggagaagttattttttattgtattaaatagtaattttttttgaaatgttattttgaatttgttaattttgggaggtgggaagaataaatataaaggtattataaattttgtatagttatagtatttaatattttaaaaagttatttttttatgaaaaattaagttgatttttgttaataagtaaattttaaaaatgtgatttttaaattttttaagggtaaagttaaaattaataattataattttgaagatgtaaattttaaaatattttgtttatttagtatagtaattatttttatttgattttaaataattaagtaaatttatatttttttattgttttaaatttagaggatgtgttatttttatagtttttttttttgaaataatttaaaggttatttttgtttttatttgttgattaaaaagaagaagaagaaataataataataaaaaaggtaaagttttttattatgtagataggtagttttttggaagtgtaaaaatatttttttttttttaggataatttggatttttggttaatgaaatgttgaattttaaagaaaattttttttattattggtatattttttttgaaattttatggttaagatgaaagaaaaaagatattaggtatttgttttttagttagtatgtgttttttagttagtatttgggaaggaaaaattttgattaggattggtttaggggatgggaaatatttaaagaagagattggttttttaattatattttggaaataaatatataaaagtaagttattttgtttatttgaaggtttagttatgatatttgtaggatttttgagggtatttaagatgttgttgataatgttaaaatagtaagtagtagtattttttgtttaattttttgaaatgtggataaaatggaggaagtatattttgtttgattttttatggttatagaaaaatgttttgttttttgttatttttttttatttgttttattattgtagaattttttaaaagagttataaaattaaattgggtgggggatggttgggatgtgaggaggatagtttttattttttattgaattaaaattgtagtattgtttttttagttttttattgagttaatattatattattttttaaggatataaaaatttgtttttgtattttgttttttttttggagggtaataaaagagttttttttaattttagagtaggattttagtgatttttgggattggtgttgtgtagtttttattgtgtttaatagggggtgttgggtatgaatttgtgtagtggtttagtgttgttttatatttgagttgggttttagttttggaaggtgagagttgtttgtggggttgagtatagagttttagtttttgtggataaaaagagattaaaggttaaatttttttttggggatatgtgtgtgtgtgtgtgtgtgtgtgtgtgtgtgtgtgtgtgttggtgtgtgtgtgtgtatatgtgtgtatgtgtgtgtgtgtgtgtgtgtatgggggggtggttattaattttaattaattatgaaaatgtagagttttttattttttgatgtttttataaagaaatttttattggatgagaaattatatggtttttgagttaatattgtagttatagtgtgggggaaattatttaattaaaaatatatttttttatttgtttatatgatttttttagaagtatttaaaaagttgatattgatttttttggtttgttaattttgtttttagttttaaatatttttaattatattgaaggtttttttattaatttgaaggagaaaaaaaggagatttaaatatttaaattatttttaaatagttatttttttgtatttttttgttttattttttttttaaataggggtttttatgtgagtgatatattttatatttttgattttgtaaagttaggtataaatgataaggagtggttttaaataataataataataaaatttaatttgggattatataatatttaagtagagtagaagatttaaataaaattgtaatttatttatttatttttttttaatttaatttaaaaaaaaaaaattttttatttgtatttaaatagtgtgtttttaattatagtagttggggatgtatgaggttgaaatgaaattagtagttattattagttttttaattttgtggtgtttttgattagtattaaattagttttttagttttaataaagattttatagtaagtagtgggttgtaaataagatagtgtgatttgtttttaatatttttttttttgttaa

SEQ ID NO: 49 - DNA, 4324 bp, Artificial Sequence
  chemically treated genomic DNA (Homo sapiens)
gttttttagtattattattttaaaggtatttttattttttttattattagggaaggagtgtgtagttttgatttagttttttagtggagtaaagggaatttagaggaagggggatttttgtagaaattgttagttatataagtaagttttttttggttttttgttttattaaaagtgaaaaattgtttataggagtgtttatgttttttgtttttttatgtattattagagttaagaggggattttgttagtaaggtattttttgttttgttttgtagattatagtttttgatttttattttattgtttgtgtaatgtgtagaattggagtttaaagtagtgggtttaggattattttttaggtttggtgggtttatagattttttttttggttgggaagaggggtttttgtgaaagtagagtttgataagttttagtattgttatggttaagattattaatattattattgttgtgtttataaatatgaagattatggtagaggaggagttgaaagtttgaggagtggtagaggaagttgtagaattaaatttggaaattatgttttttgatggggtgatagtggtttttgatttggtttgaagggatatttgaagggtagatattgtgttttgtgatttttattgaggaattttaggaatagatgttattgaattgttttgtttagggataagtggtgttttttttagttttttgttgattttgattggttatgttttttgtggtatggggttggttgtagtggttggtgggtgtttggtgggtattttggtttttttaagggttggttgtttttttttattggttatataagagtggttgtttttttttagtttgaagtttgtagtatatttgtaggtaaagttttttaagttgtttaggtagttagggagttttgtgtatttgttagtatggaggtattttttggggtagggatataatatattgtttgagagtttgttttagtgagtgttgattttgtttgtgatgtaagtaattgagattgggagttgtttttggtagagtgtatttattttggttttaggtggattgaagtttagagtggtgttgtgtagttggaagggtgtgtgatagtttaagttagaggtggttttggggtgtggtgtaggatataagattttaaattggtatttgtataggtagttgttggtgtgtaggtggtattgtatttttttttagtttgtgggtttgattttattggtggtttggagtattgtgtatttttgtgtggtgtaggagtgttggggtttttttatttattgtagtgtgttgtttttgagattgttggggttggaggatagttaggagaaattttgtaaaggtttgttttttagggtgtagtgggaatgtttgtgttttagtgtgatttagaatagtaggtttttggagttttttttgggttttgggtttgtttgtaggagtgtgagtatagtgtgtagtttggtgtttgtatgtatggtgttgagtgttttattttgtaggatgtaggtttttttggttgtttgttgttttatggtagtgtggtgtaggttgtagtaggtttttgaggttgagtagttagtatggttggtagtggggtgtttgttgttgtttggtttgggttagagtgtttgttagaggaggtatagggtgaatgttggttttattttttgaggttttgtatgtagagttgtttttaatttggatttgttttgtttgaggatgtagagttgtgtttggagtgtggttattgttttttatagttggtttttttaatttggttttttttttttttttttttgtttttgtttttgatggattttttaattgttaagaatttttttgtgggtttagtggttaatagttttttttaggttgtgataggaaatgtgtgtggagtgttgttaggtttggtgtagttttgagttattttggggttaggaatatagttggtgttgggtataggggatgtagttgattagaaggttaaatattttgtttagagtaagaggagaaatttgttattgggatgaagtgtgtggtttttttttgtttagggagttttattaggattgtagaatttataatatgtaagtgaatataggtaggaaggatttgagaaaggaattggtttatgattataagattatgtttgtttattgtgtttttgtttggagttgtggagttagtgttagaataatttgtagatggttttagtgtttggggggtttgtgtttgtgggggaaaaatatgttgtgaaataatttagtaattgtttttgttattagaggtagtattatttaattgtatatttttttatgggtttttgtttttttattatgttaagagattttaggagttttaattattaaagaatttggagttgtttgggtattttaaatgggaaattttgttttttttattagtatttgttttagaaatttattttttatttttatgtgtttttttttgagttagattatattgatttattatagaaaggaaatgtatttttaggattaaatgaaaaataatgattatagattttaatagttaggttgttagttttttttgttattgtattggtttaaaaattttttaagtttataggttatatataaatgagtttgtggttttataaatatttgagaataattgttttatgtgtgattttagttttgaattattttagtattatttttttttatgattgagtggtagtatttataatagtaagttgtaaatattttttttaaggaaaattagagttttttaagaaattaaaatgtttattttattataatgaatattgtatattgttaaaaaatattttgtaatttgaaagatgggtgagttaatttttttagaattttagtgggtgttttgttttaatataaatattttaatttagtgggaagtggtaaggaattaaagatgaataaagaagtaaaggttaaaaattgtattgttatgaaaggattttttgttagtaatttagataatttagtattagtttagaaaatgtatattttattttggtttataatggttaaatatgttgttattagaaatatatagagagttttagttaagtttttttagagatgtttgatgtttttaaatatttttaattagaatgaaagttgttattttatggataatgtatataagtttattttgttttattgtatttaggttgatgaggggtgggagggaaggttttaggattatatttgtatgtttttattttatttttattataatttttatttttttttttttttggaaattttatgtattttaataaataatagtaagtttatgagttattattatatttattttgtttttgttgagtatggagttttgtattaggattttttttttgttttattttttaatttaaagaatattttttagttttttttttagatgtttgagaattattttaaatgtggttttgtgtttaaattaggtaatttagtgttttataagaaagaaatatgaaaatttagaaattaaattgaatggtttttaaaaaatatttagttatttgggttagttttttatagattattgtaattttatgattgtgtttgtaaatgtgtttatgtagtgtaatatttttaataaaattttttttaaatttaagtagttaatggaaattttttagatagttttaaaaattgtttgggatgagatgaggtgtttatagtaagaaagaatgaatagttggaaagtttaagtaaatatatgattttattttttgatattttgtttaggggagtgggattatagtagagaatatattggttataatgattatatgagagtattgattatgattatgattatattatggaatgatataagagttagaaaaaattagtttaaagtaggatgtaaatagttttgtaattagtttgaaatagatagtttatttgattaaattagaaatggaggaaagtttttattttttaataatatttattaagataataatatagaattattttatttttattggattttaaatgtttaaaaattttataatattaaatgtgaatttattggtttttttatatgttatagattagagtaattattttggaaaaatttgatatttttttttattaaaattgaatatttgtaaattttagtatttttatgataaggtataaaattaagagaaatttttgtatatgtataatagaagatatgtaaaaaatgtttatagtgatattatttatattaataaaatgttgaattaattaaaatatttaaaaatagtataaaaataaat

SEQ ID NO: 50 - DNA, 4324 bp, Artificial Sequence
  chemically treated genomic DNA (Homo sapiens)
gtttatttttatattgtttttggatattttgattgatttaatgttttgttaatatgaatagtgttattataaatattttttatatattttttgttgtatatgtgtaaaaattttttttagttttatattttattatggaagtgttagagtttgtaaatatttaattttagtgaaaaaaagtgttaaatttttttaaagtggttgttttaatttgtaatatgtaaaagagttaatagatttatatttggtattataagatttttaggtatttggaatttagtgggggtaaaatggttttatattattattttaataaatattattaaaaaatagaaatttttttttatttttaatttggttagataaattgtttattttaaattaattataaaattatttatgttttattttgagttaattttttttaatttttgtgttattttatgatatggttatggttatggttagtatttttatatagttgttatggttaatgtgttttttgttataattttatttttttagatagaatgttagggagtgagattatgtatttatttaagttttttagttatttatttttttttattgtagatattttattttattttaaatgatttttaaagttatttaagaaatttttattgattatttaagtttgaaaaagattttattaaaaatattgtattatatggatatatttataaatatagttataagattgtaatggtttatagagagttggtttaagtgattaagtattttttaaaaattatttaatttgatttttggatttttatgttttttttttataagatattaagttatttaatttaaatgtaaagttatgtttaaggtgatttttagatatttgaaggaaggattaaggaatgttttttaaattgggaaatagggtaggagagaaattttagtgtaaagttttatatttagtaaaagtaaggtaagtatgatgatgatttataggtttattgttgtttgttaagatatatggaatttttaggaggaaagaagaatgagagttatggtaaaaataagatggaagtatatagatgtgattttgaaatttttttttttattttttattaatttgaatgtagtaaaataaagtgagtttatatgtattatttatggaatggtaatttttattttgattaaagatatttaaaagtattagatatttttaagagggtttagttgaaattttttatgtatttttgatggtaatgtatttggttattatgaattaagatagaatgtatgttttttaaattgatattgaattgtttaagttgttaataagaaatttttttataatagtatagtttttaatttttatttttttatttatttttaattttttgttattttttattgagttgaaatgtttatattaaaataaaatatttattggaattttaaagaaattggtttatttattttttaaattataagatattttttgatagtatataatatttattataatggaataaatattttaattttttaaggaattttaattttttttaaaggagatgtttataatttattattataaatgttgttatttaattataggagaaaatgatattaaaatagtttaaggttaaaattatatatagggtagttgtttttgaatatttataaggttatgaatttatttatgtataatttataaatttgaagaatttttgaattaatatagtggtaaggaaagttaataatttaattgttaagatttatggttattattttttatttagttttagaaatatattttttttttgtaatgaattaatatggtttaatttaaagagaaatatgtggaagtgaaaaataaatttttaaagtaagtgttgatggaagaagtagaattttttatttaaaatatttaaataattttaaattttttagtagttaggatttttgaaattttttgatataatagagaagtaaagatttatagagagatatgtggttaaatagtgttgtttttggtggtaaaagtagttgttaagttgttttataatatattttttttttataggtataggttttttaaatattggagttgtttatgaattattttgatgttaattttatagttttggatagaaatataatagatgggtgtggttttataattataagttagttttttttttaagttttttttgtttatgtttgtttatgtgttatgggttttgtggttttgatgaaattttttgaatggagaaaaattatatattttattttagtggtgaatttttttttttgttttaagtagggtgtttgattttttagttgattgtgttttttgtatttggtgttagttgtgtttttgattttagaataatttagggttgtattgggtttggtagtgttttgtatatattttttgttgtggtttaagggaaattgttggttgttgggtttgtggggggatttttggtagttggggggtttgttgggagtgagggtggaggggaagggagggggaattgggttggggaagttagttgtagagggtggtgattgtgttttagatatagttttgtgtttttgagtgggatagatttaagttgggagtagttttgtgtgtggggttttagagaatgaggttggtgtttgttttgtgttttttttggtaggtgttttggtttgggttgggtggtggtgaatattttattgttgattgtgttggttgtttggttttgggggtttgttatagtttgtattatgttattatgaagtggtaggtggttgaggaggtttgtattttgtgaggtggggtgtttagtattgtgtgtgtgggtgttgagttgtgtgttgtgtttgtgtttttgtgggtaggtttagggtttggagggggttttaaagatttgttgttttgggttgtattggagtgtaggtgtttttattgtattttggagaatgagtttttgtggggttttttttggttgttttttgattttggtggttttgaaagtgatatgttgtagtgggtggaggagttttaatgtttttgtattgtgtggagatgtgtggtattttaggttattggtggggttgagtttgtaggttggaaggagatgtgatgttatttgtgtgttaatggttatttgtgtaagtattagtttgaggttttgtgttttgtgttgtgttttggggttgtttttaatttgagttattgtgtgtttttttagttgtatagtgttgttttggattttagtttatttgggattgaggtgagtgtgttttgttggggatagtttttgattttagttatttgtattgtggatgaaattggtgtttgttgggataaatttttgggtgatgtgttgtgtttttgttttgggaggtatttttgtgttggtaaatgtgtagagttttttaattgtttagatgatttgggaggttttgtttgtgaatgtgttatgggttttgagttggggaaggatggttgtttttgtgtgattagtggggaaggatagttgatttttggggggattggggtgtttattaggtgtttgttggttattgtaattagttttgtgttgtagagaatatggttaattagggttgatgagaagttgggagagatattatttgtttttgaataagataatttagtaatatttatttttgagattttttgatggggattatagagtatgatgtttattttttaaatgtttttttaagttgagttaaaggttattattattttattagggagtgtgatttttaagtttaattttatgattttttttgttattttttaggtttttgattttttttttgttgtggtttttatatttgtgagtatagtagtagtagtgttggtgattttgattatgatagtattggggtttgttaagttttgtttttatgaaagtttttttttttagttaaggaaggagtttatgggtttgttgggtttggagagtgattttgagtttgttgttttgggttttagttttgtatattgtataaataatggggtgaaagttggggattgtgatttgtgggatagagtagagggtgttttgttggtggagtttttttttggttttagtgatgtatagggaaataggggatatgggtatttttgtgaatagttttttatttttgatgaaatggggaattaagaggaatttatttgtgtaattgataatttttgtagaaatttttttttttttaaattttttttattttattgaggagttaaattagaattgtatattttttttttgatgatagaggaagtggaagtgtttttaggatggtgatattgggggat

SEQ ID NO: 51 - DNA, 5683 bp, Artificial Sequence
  chemically treated genomic DNA (Homo sapiens)
ataatgttaaatgtaaattttttgttttgtttaatgtttttattttatggttggtaaataaaaataataaaatagtattgataataataatagaaataattaattgaagttgtagtttttaatttttttaaagataataggttaaagtgaggtttttataataagatgttagttattaggaaggaagttagggaaaatttttttttagggggtaattgatttttattggtttaatattgtatgtagtattgagttaggaggttttatggagaagtgtttgtttttttttttttgttgttagaataaagtttataaataattttgttttttttatatttttggagttagttagttagggtttttatttatgtttaggggattagatttggatatttgtaaaagaattgaatatagatggatagttaagaaaaaaataaatgttaagattattattatttatagtttaatgatttagtaatttaaaaaaatttaagaataataaaataatttttaagaaggataagaattttaaaatatgtagtttagaaaattaaattttttaggtttagagtttaagtaaaagaaaatttgagataatgaagtttggaatattgggtttgtattttgtttttgattttgtgtttttgggtaagatattgaatttttttattttagatttattttatattttaaggagggtgtaggattttgtagtttttttagtgatggtatattattaattagaattttaattagttttatttttattattttagtaaaatgatgttaaaaattagattttgtgatatgagagaagaggggaaattaattatagattataaagaaattgtgggatttaagtttagggtgaggtgttttattgaatttttagggttggttatagtatttgttatatagtaggtatttaataaatgatgtgtaatgggtggttagattgatggaaaggtaggtttttttagtgatggtaaaggatttggggtaaaagagatttgtggttgagttttgatttttatatattagtatattgattagatgaagttataagttttaatttttttttgtgtaaaatggagataatattttatagggttatgaggattaaataagaaaatgtttagtttagtgtttaatatataggaagtatattgtaaatattagttattattattattaatattgtgattatattttttatttaaagatttttttgaggagtagggggtatttagagataaaaagtttgtaggtgggaaatttgttagttttttagggtgttaggtttttgtggaattttgtattttttttttgttttagtttttaagaatagaaattttttagggatttttggtgaggtagttgtgggaagatgaggtgtagaagtaagttgggatttgtgagttttaattttggttttttttgtgttgagatttaagtggattttgtttggtttgtatgtgttattgggggaaatggatgtgggtttgagtgtggtaggtgtgagggtgttgttttggggttgattattttgtggggatattgtagttgttatttttttttttgtaggtgggtaggggaagtggtggttaaagtgggagttgattgtttagtatagtttgtttgagtgttgattaggaaagtttaggttttttttaaattttgttgttagatttggtgatgtatttgtatgtatttaaggtgtttgtatgtagaatgttattatagaatgtagttattttttttaatggtttgggaaattagaggtttttttagttatttagggtagaggaattttttttatttttatgtgatattttttgatttagaagaattaatgttagattttttttgggtttttttatttatagttatagttttttttttgtttagttaaaattgaggtaggtaggaaaatattattgggggtataagtttattagtgtgtaaatgtatttttatgaagtgtgtttttagggagttattaaaaattgattttttaattatagaaatagatgagattttgagaatattgagaagttgttttttgtaaagtaaatttgtaatggtttttgatgaaggggggttgggggtggggagaagtttagttgagagaggagtttattttatgttatatttttgtagttgaaaagttgtttaattattgttaattgttttttgtataagagttttgggaagattttagaaataaggtaaatgaagattttttattgttttttttgggttgttgtttttggaagttgaagttttagtatgtagagtagtaggagagggttatttttaggtaattttattgagtaaaataaattatttaatggtataatgttttggtttaaaaaattggaatttattagaggtaaaaatattttttaagaaattatggatattttgtgttttatttatttttatggtagtagagtatttgtattttgagttatttatatagatttatgttttgtattgtttttattttttttttttttgaagtaaagtttttttttaagaaggtggttagaaagtggattttattgggggaaaaagaaaaatgaaatgtaaattagtttggtattgtttgtgttttttaaaatgtggtgggataaggttattgagtttatagttaatttttttatgtatataaaatgtatatatatgtatatatttttatatatataaaagaatttatatatatgtatatagttatgtggagttttgaagtaattttttatgtttttgttttttttaagttttttaggtggaggtagttataagtattataagttgttttagtgattattagggatggaaattgttaattattatgtttttttttatttttaggggttttttggtttgtgatataagaggttttggtattggtgtttttttagaattggtttagaggagttagtttagagtgtgaggttgggtttgtattgaatgtatatattgaggtttattagatttttttgattttagtgaagggtgttgattgttgtgttgttagaggttagtaagttttttgtgtgtagttgatgagttttagtaatttgttatttgggtgtttttttttaaattttgggagtaaattgggaaaataaaaaaatttttatgtttattggttttttttttttttttaatttttttttttgatttgtttgtgggagtttttttttttttgttgggattataatgtgatgtgtaattgtttgtgaatgaataaaagttattggtaagtagggagatggggatagattgttgatggtagattgagggtggtagtaaaggtttggtttttaaggataatggggagttgtttttttttatgtttggtttttatggttttttttgttttttaggtaaaatgaatgtttttttatttattatttgtagagtatttttaggtgtgtgtagaatttgttgatgaaatttattagtgttgattgggtagttttgtggagttatttgaggttttttattgtggtttttgtttgtagaatttaagtatttatataatgtattagtatggaatttagtatttggtggggatattgtgtgttaagtttggtgtggttaatgttttagtggtttttttatttggtagttttttaggattatttttgaggaggtattggagttgggttgtaggtgtatgggtaaagaatttagtattttatttaagtattttgttttttttggttgtttttgggaggttatgtttaaaaatataaaaataaaaataaaaataaaaataaagggaggtggataaagttttggtgggtgaattgaagttgggtttatgtgattttgaagttggagaaataaatttaatatgaattttgtttttttggtgggtgttgggattttgttgttttttatgttaattgttggaagttttgtatttaatggttataggtgtttaggagtgtagagaggttttgggtttaaattattggtgtgtagggattggatttgtgggtagtgatttttttaatttttttttttttgttttatatatatatttttgtgttggttgaaagtatggaggatttagggtatttgaaaaaagaggggttgggtgtggtggtttatgtttgtaattttagtggtttgggaggtttagaagggtggattatttgaggttaggagtttgagattagtttggttaatattagtttggttaatatggtgagattttgtgtttattaaaaatataaaaattagttaggtgtggtgtttgtaatattagttatttgggaggttgaggtatgagaattgtttgaatttgggaggtggaggttgtagtgagtttagattgtgttattgtttttttgttttgggtgatagagtaaggtattgttttaaaataaaataaaataaaatgaaagatttggttaggaaagaatttgtaggtatttgaggtgtttgtattttgtaaagtaaatgtaatttttttattaagttgaagttttttatatttatttttttagaggaaggtggtttaatttagaaattttttttaagaggattttttattgaagattattgtgaagtgttaggaatttgttttagttttgataggtgtaggattttttgtgttgttatattttgggattttatttttttaaataggttatttaaaagttagtagtgtaattgggattttgtggtgataaagaattattgtgtagaattttggagttgggagttggtttgttttttttttaaagaaattgggattttgtgttttttttgttgttagtgtagtgtgttagtggtgtttaattagtgagttttttgggtttgtgatggtttttggttttgtttttttgatggttataaaaagttgtagtgaagtttgtatttttgagtattgtgtgtggttttgtttttggtatggtttttaggtgtgttttttttttggttgtttgtagtattggttttattgtttttgttgttagttattggttttttatttgttttattttttattgtggtttggttgagttggttgttaggttttgttgtttttttttgtttttttttttttttagtggttgtattttgtgttgtattttatttggtttgtaggtgagtagtagtgtagtatttttgtttggtgagtttaatttgtttagtttggtttttgttggagtggtattggtatttttttaagatgtttttttttttgtaggatgaagaattttatgttggaggtggtgtttttattattggagaagttgttttttatttttaattttatgttttttagtttgggtgttgtgggtgaagataaagggaggaatagtttttatgaaattagttttttttattgaggtgatgtgttggaggtgttttggatttatttgatttattatggtatttatttaggagataattgtgttgtttatatgatgtttgatattttgttggttttgatagatgatatggggtgtatgtagaaggtggtttttaataagtgttttattttgggtgttattgttaaagtggttagtatttgtgtggatatagtggaggattttgtttatggagttaatattttggttaattatttggatgagtttttttagaaaaaggtattgtttaatgaggaggtggtgtggagggttgaaaagttgttgggttttat

SEQ ID NO: 52 - DNA, 5683 bp, Artificial Sequence
  chemically treated genomic DNA (Homo sapiens)
gtaaagtttagtagttttttagttttttgtgttatttttttgttgagtagtgtttttttttggagggatttgtttaggtgattgattaggatgttagttttgtaggtgaagttttttattgtgtttatgtggatgttggttattttgataataatgtttaggatgagatgtttgttggagattattttttgtgtgtgttttatgttgtttgttagggttaataggatgttgggtattatgtgggtaatatggttgttttttaggtagatgttatagtgggttaggtgggtttggggtatttttagtatgttgttttggtggaaagagttggttttataaaaattgtttttttttttgtttttgtttgtggtgtttgaattaaagagtgtgaagttggagatgaggagtagtttttttagtagtaaagatattatttttagtatggggttttttattttgtagggaagagggtgttttggagaggtgttggtgttattttggtaggggttgggttgggtaagttaagtttgttgggtaggggtgttgtgttgttgtttatttgtaggttaggtgaggtatggtgtaaagtatggttgttgaggagagaggaaggtaaaggaggatagtgaggtttggtgattggtttagttaagttataatggggaatgagatggataaggaattggtggttgatggtggggatagtgagattagtgttataagtagttggagaaggagtgtatttgggggttgtgttgggggtagggttgtgtgtggtgtttggaggtgtaggttttgttgtgattttttatggttgttgagggggtggagttgaaggttgttatagatttggaaagtttattgattgggtgttgttggtgtgttgtgttagtggtggggaggatgtgggattttggtttttttgggaggggggtgggttgatttttagttttagggttttgtatagtgattttttattgttgtgggattttggttgtattattggtttttaagtggtttatttagggaggtagagttttaaggtgtggtggtatgaaaggttttgtatttgttgggattggggtgagtttttggtattttgtggtagtttttggtggaaagtttttttgggagagatttttgagttggattatttttttttaaaaggatagatatgagggattttggtttaataaagagattgtatttattttgtaaagtgtgagtgttttgaatgtttgtagatttttttttgattgaattttttgttttgttttgttttgttttgagatagtgttttgttttattatttagagtaggagggtggtggtgtgatttgggtttattgtaatttttgttttttaggtttaagtgatttttgtgttttagttttttaagtagttgatattataggtattatgtttggttaatttttgtatttttagtagatatggggttttattatgttggttaggttggtgttggttaggttggttttgaatttttgattttaagtgatttgtttttttggattttttaaattgttgggattataggtgtgagttattgtgtttagtttttttttttttaaatgttttgaattttttatgtttttagttggtgtgagggtgtgtgtgtagggtgggggggggggggttgggggggttgttatttgtgagtttagtttttgtgtgttggtgatttgaatttgaggtttttttgtgtttttaggtatttgtggttgttgagtatgaagtttttaatggttggtatgaaaaatggtggggttttaatgtttgttaggaaagtaagatttatgttaagtttatttttttggttttagggttatatggatttagttttagtttatttattgaaattttgtttgtttttttttatttttatttttatttttatttttatgtttttaagtataattttttggagatggttaaggaaggtgaagtatttggatgagatgttaagttttttgtttgtgtgtttgtagtttgattttaatgtttttttgagggtggttttagggagttgttgggtgagggagttgttgaagtgttggttgtgttaggtttggtatgtgatgtttttattgggtgttgagttttgtgttaatgtattatgtaaatgtttaaattttgtagataaaggttataatggagagttttgggtggttttataaagttgtttagttggtgttaataggttttattagtagattttatgtatgtttgagggtattttgtggatgatggatgaaggaatatttattttatttggaagatgaagggggttatagagattaggtgtgagggaaaatggttttttattatttttggaggttgggtttttgttgttatttttaatttgttgttagtgatttgtttttgtttttttgtttgttggtgatttttgtttatttataaatgattgtgtattatattatagttttagtaaagaggagaaaatttttataaatgagttgaaagaggaagttggagaaggggagagagttagtggatgtggagatttttttatttttttagtttatttttaaaatttaaagaaaagtgtttaggtggtgagttgttgaaatttattagttgtgtatagggagtttgttagtttttagtagtatagtagttagtattttttgttaaaattgggggagtttgatagattttggtgtgtatgtttaatgtagatttgattttatattttgaattggtttttttgggttagttttgggaaagtgttaatattgaagttttttgtgttatgggttaaagggtttttggagatgaaaggaaatgtgataattaatggtttttgtttttggtggttattaaggtggtttataatgtttatgattgtttttatttggggaatttgagggagataaaagtatggagaattgttttagggttttatatagttatatatatatatatgaatttttttatgtatataaaaatatatatatatgtatatattttatatatatgaaagaattagttatagatttaatagttttgttttattgtgttttggaagatgtaagtagtgttaagttgatttgtgttttattttttttttttttttggtggggtttattttttggttgtttttttgggaaagggttttattttaaaaagaaaggaggtgagagtgatatgaggtatgaatttgtataggtggtttaagatgtagatattttgttgttatggaaatgaatagggtgtggagtgtttatagttttttgaaggatatttttgtttttgataaattttaattttttaagttagaatgttatgttattaagtgatttattttgtttagtggaattgtttgaaagtaatttttttttgttgttttgtgtgttaggattttggtttttggaagtgatagtttgaaggaggtagtgaaaagtttttatttgttttgtttttgaagtttttttagaatttttatgtgggaagtggttagtgatgattaggtagttttttaattgtaaaaatatagtgtggaatgagttttttttttggttggatttttttttgtttttgatttttttttgttaaggattattgtaaatttattttgtaaaaggtagttttttaatgtttttaaaattttatttatttttgtggttgagaggttagtttttaatggttttttggaggtatattttataaaaatatgtttatatattaataggtttatgtttttaataatatttttttatttgttttaattttagttaaataaagggaagattatagttgtaggtggaaaggtttaagagaaatttaatattagtttttttaaattagaagatgttatatggagataggagaaatttttttattttgagtagttggagagatttttggttttttggattgttaagaaaggtggttatattttgtgataatgttttgtgtgtaaatgttttaaatatatgtgaatgtgttattaggtttggtggtgagatttagaaagagtttggatttttttggttaatatttagatagattgtgttgagtggttgatttttattttggttattgttttttttatttgtttgtagaagaaggaatgatagttatagtgtttttgtagggtggttggttttggggtagtgtttttgtatttgttgtgtttaggtttatgtttattttttttagtaatgtatataggttaagtaagatttgtttgggttttagtgtagaagaggttgaaattgaggtttataggttttagtttatttttgtattttatttttttatggttattttattagaggtttttggagagtttttgtttttaagaattaggatagggaagaggtgtagagttttatagaaatttaatgttttagaaggttaatagattttttatttgtaggttttttatttttggatgttttttgttttttagagaagtttttggatggaagatatgattatagtattagtaataataataattaatatttatggtgtgttttttgtgtattaggtattgaattaagtatttttttatttaatttttataattttatgaggtattatttttattttatataggaagaaattgaagtttataattttgtttagttagtgtgttaatgtgtggggattaggatttaattataggttttttttgttttaggttttttattgttattgggaaggtttgtttttttattagtttaattatttattatatattatttattgaatatttgttatatggtaggtgttatgattaattttagaggtttaataaaatattttattttaaatttagattttataatttttttgtaatttgtaattaattttttttttttttttatgttatgaggtttaatttttaatattattttattgggatagtgagaatagagttggttaaggttttgattaatagtatgttattattaggaaggttataaaattttatattttttttagggtgtaggatgaatttggggtggggaagtttaatgttttatttaagggtatagagttaggagtagaatgtaggtttagtgttttagattttattattttagatttttttttatttgagttttaggtttgagaaatttggttttttaaattgtatgttttaaaatttttgttttttttagggattattttgttgtttttggatttttttagattattaaattattgggttataaataatgataattttaatatttgttttttttttagttatttatttatatttagtttttttataaatgtttaggtttggttttttggatataaataggggttttaattagttaattttaaaggtgtggggaaaataaagttgtttgtgaattttgttttgatagtagaggaaaagaagtagatatttttttatggagttttttaatttagtgttatatgtagtgttaggttaatagggattaattattttttgggaggagattttttttggttttttttttggtgattagtattttattatgaggattttattttagtttattgtttttagaaagattaaaagttgtagttttagttggttgtttttgttgttgttgttaatgttgttttgttgtttttgtttgttaattataaaataagaatattgaataaaataaagaatttatatttagtattat

SEQ ID NO: 53 - DNA, 2347 bp, Artificial Sequence
  chemically treated genomic DNA (Homo sapiens)
ttgaggtttaagttagggaggttgagattgtagtgagttttaattgtgttattgtattttagtttgggttatagagtaagattttgtttaaaaaataataagaaaggtggaggaaataggtagagattagaggaaagttatggtttttttttgattattttgagatttttttaattttattaatttttggagagttttttatttgttttattttatagattgggaaattgagtttaggggtatttagattatttgaggttttagttggagatgaagagatggatttaaattattttttgtggagtatagttttgttttttttagagtggagattgtgttttagggttttttttatttgtattaaggttggtttttttaggttttattttttttatttgtaaaatgggtttttgtgagtatgaaggagggtttggtttgtagtgagtgttgtttatttgttggttagtgtgattagttattgttgttgttttttagtggtttttgtttggtagttgttggaaaaatattgagggagggagatatagggttggggaggtgaaaagttggatatagatgtttttagttttttgggattaggaatagatggaggttgggtgttttgaagtggagtagggaggattgtttggaggagggatatttgagttagaatgtatagaattatagggtatttttggtagaggttatagtagaggtaaaagtttagaggaggtgttttggggattattaagatggatatagtgggtttgggtttttgtggggtgatgggttggggttttgagtgttaggttaaagggtttggttttttttgagggtggtagggagttatggtaggtgtgtgagttggaggggtattttagataaaggtgaagtggtatttttttttttattgaagttataatttgatattttttttgaagttttttatattttattttttttttgttatattttggtaagtttatttttttttttttgtttttaggtttgttaagaggttttgtgggttttttatggttttatttagttgttttagaagtttgtttgagataagtttttagggttgttttatttttaggtgttttatagatttgggggtgggtgaagtaggaaggattgagttatgagggttttagaaaatatgatgggaggaattatagtatttttttatttttttagtttttgtttttttagggagagagatttttagtttgaggaggagggttgagtttttttttatgtggtaagagattttaatgttgttgaggattatttaaagagggtgttgaaggatgtataggagttagttaggagataatttatttgttaatttaataaatttataggtattatttattaataagaataatttttattatttaattaggattttttaatgtttttgagggattatttgaggatgtttaattattatttttatttgagatagggttttattttgttatttaggttggagtgtagtgatataattatagtttattgtagttttaattttttagttttaagttatttttttattttagtttttgatatagttgagatataggttaatgttattatgatgtttggttttttttttttttttttttttttttatttttgagatagagttttgtttagttatttaggttggagtgtagtggtgtgattttagtttattataatttttgttttttgagtttaagtaatttttttgttttagttttttgagtagttgggattatagatatgtattattatatttagttaatttttgtatttgtagtagagatggggttttattatgttgtttaggttggttttaaatgtttgattttaagtgatttgttggttttggttttttaaagggttgggattattggtgtaagttattgttttttgattatttagtttttttttttttttttttagtttttggtagaaatgtggttttatgtttgtattttagtattttgggaaggttgaggtgggtagattatttgaggttaggaatttgagattagtttgattaatatggagaaattttgtttttattaaaaatataaaattagttgggtatggtggtttttgtttgtaattttagttatttgggaggttgaggtaagagaattatttgaatttggtaagtggggtttgtggtgagttaagattgtgttattgtattttagtttgggtaataagagtgaaattttgttttaaaaaaataaaataaaataaaaatataaaattagttaggtatggtggtatgtgtttgtaattttagttatttaggaggttgaggtaggagaattgtttgaatttggtaggt

SEQ ID NO: 54 - DNA, 2347 bp, Artificial Sequence
  chemically treated genomic DNA (Homo sapiens)
gtttattaggtttaagtgatttttttgttttagttttttgagtagttaggattataggtgtgtgttattatgtttggttaattttgtatttttattttattttatttttttgagatagaattttatttttgttgtttaggttggagtgtaatggtatgattttggtttattgtaaattttgtttattaggtttaagtgatttttttgttttagttttttaagtagttgggattatagataggagttattatgtttggttaattttgtatttttagtagagatggggtttttttatgttggttaggttagttttgaatttttgattttaagtgatttgtttattttggtttttttaaagtgttgggatataggtatgagattatatttttattaaaaattgaaaaaaaaaaaaaaaaagttggatggttgaggggtggtggtttatgttggtaattttagttttttgggaggttgaggttagtagattatttaaggttaggtatttgagattagtttggataatatggtgaaattttatttttattataaatataaaaattagttgggtgtggtggtgtatgtttgtaattttagttatttaggaggttgaggtaggagaattgtttaaatttaggaggtggaggttatagtgagttgaaattgtattattgtattttagtttgggtgattgagtaagattttgttttaaaagtaaaaaaaaaaaaaaaaaaaagaaaagttaggtattatggtggtattggtttgtgttttagttatattagaggttgaggtagaaggatagtttgaaattgggaggttgaggttgtagtgagttatgattgtgttattgtattttagtttgggtaatagagtgagattttgttttaaataaaaataataattaaatatttttaaatgattttttagaggtattagaaagttttgattgaatgatgaaaattgtttttgttgatgagtgatgtttatgagtttgttaaattaataaatgggttgttttttggttaatttttatgtattttttaatattttttttagatgatttttagtgatgttagggttttttgttatatggagggaagtttggtttttttttttgggttgaaggtttttttttttgagaaggtggaagttgaggaggtggggaagtgttgtggttttttttgttatgttttttggggtttttgtgatttgattttttttgttttatttgtttttgagtttgtggggtatttgaaagtggggtagttttgggaatttattttagatgagtttttggggtagttgggtggggttataaggggtttatagggttttttggtaggtttagagatggagggaaggaggtgggtttgttaagatgtggtaaggggaaggtgggatgtggggaattttagagggagtgttaggttgtgattttaataaggggagaaatattattttatttttgtttggggtatttttttagtttatatatttgttatggttttttattgtttttggagaaagttaggttttttagtttggtgtttgaggttttagtttattattttatagaaatttagatttattgtgtttattttggtggtttttaaagtattttttttggatttttgtttttgttgtggtttttgttggagatgttttgtaattttatatattttagtttaagtgttttttttttaggtagttttttttgttttattttagggtatttggtttttatttgtttttgattttaaggggttaggggtgtttgtgtttagttttttatttttttagttttgtattttttttttttgatgtttttttagtagttgttaggtagaggttattggggaataataataatgattaattatattggttagtgggtggatagtgtttattgtaagttaagtttttttttatatttataaaagtttattttgtaggtgggaaagatgaggtttgagagggttaattttggtgtgggtgggggaagttttgaggtatggtttttattttggaaggggtaaaattatattttataaggggtggtttgaatttatttttttatttttagttggggttttaggtggtttgagtgtttttggatttagttttttaatttgtgaaataaggtaagtgagggattttttaggaattggtggagttgggagggttttaggatggttaggagggggttatgatttttttttgatttttatttattttttttattttttttgttattttttgagtagggttttgttttgtggtttaggttggagtgtagtggtgtaattagagtttattgtagttttgatttttttggtttaagttttag

SEQ ID NO: 55 - DNA, 6709 bp, Artificial Sequence
  chemically treated genomic DNA (Homo sapiens)
atttttaaattttttaatttatagagggttggagagttggtattatgagtttttagtttttatgggtgagaaaagaggtgtttgtgtggagggtaggtgtgattttgggggttagtagagaggagaggttgtgggaggatttgttgtgaagggtgaggggtggtgttgggtgggatgggtgtttggggttgtgtagggtggtttttgggtgttgtttgggttgtttgttgtttagtattggtgtaggaagatgggtttgtgtagtgtttggtaatagtggtttgttttatgtttggaggtgattaagttttgagttaaaggtgttgggtttagttgggaagtgtatggtgatttagaatatggagtggagaaggttttaggggatatgaggttattgttttagtttttgggtttgtgttttgagtggttagggtgtgtatggatgggttttgggatgttagtggagaggtgataggagtttattattttatggttaagtgtgtgaggtttttggtgggtgggggttttttttggggtagggtagggggagagttaggtatgtttttaatgggttttttagtagaattgttaggaaagtggtttttaattttaggtatttttgtggtttttaggtagttgggtgattaaaaatttatttttgtttgttgtgaaatgggataggtggttgttaggttagagattgtgtttatgaagttttgtttggtgggttgggattgatgtggatttgggttttttttggaagtttgggaatttgtgagttttttagttttttgttttattttgtttgtttgaaaaaaggagttgtttgagaggaagagttaaggtttaaaaggttttaaatgaagagtatgtggtttgatgtggagtgtaaagaagtgagtagtgaattgaatttggtgggattgagattagaggtgtttgtatgtggtggttgttttgtgttttattaaagtaatttgttatttatgataattatttttgtaattattttggagtggttgtgatttgatgtttgtggtgttttagggtatgtttttattggatatagatattttagggtgttttttgatgttagtgttggtttagtgggtgttagtgttgtgaagggagggtggtgggtgtgaatgttttttttttttgggtttgttgtaggttttggtttttttattttgtttgattttggtgggtttgttatttattgaggtttttattggtgtttatgttgttttgagaggtgggataaatgtttggtgtgtggtgtggagtttgtgaaagtgtttgggggtttttattttttgtttgggagttttttttttggggtgggaagaggagttgtagatttgtttgaattttgttttatttgtttggttgtttttttttgtttggggtgggggtaggggtggtggatgatttaggtttggggttgggagttttgtttttaaaggtattattttgtgtttttttggaagtggtgtgttgttggggtgtttttgttgttgtagaggtttggtttgtggttttataggggtgtgggtttagggtttttagggagtaagtgagtttaggttttttagggggtggtagaggggaatttttgataattttttatttttttttttaggtggttgtgaggtttttggggttttagaggggtttttttttgttggtgttggttgttttgagtgtggttatgtagtttgtgtttttatgtgggtaaggggtggggatgttggagggaggttgttttggatgttggagtttttggtttttggttttgttgagtagaaaagttgaagttaaggaagggttgaggtttttttataagggtgtgtgtgtgtttgggtgttggtttagaagttgagaatgtgtgtattggggaagggttttttgtgttgagaagatagaggatttgttttagttgttttttgtatagagggtgtggaggttgtgttttagtttgaatgtttatttattggaaagagggtagtgttggggtttagggaagttttttgggaatgaatggtttttgttaagtggttttggattttttgggttttttgggtttatggtatggtgttgtgtgagtttttagtgtttattggttttttttgttttttgtgtagatgtttttaggtggggaggtatattggtttttttgggtagttttggttagtgttgttgtgggaaaggagagttagggtttgggatgggggatgagtatttttttgtttattttgggttttagtgtgtaggaggtaaatttgttagtatagataagatagtttgtttaagttgtattttaggttgggttagagaataaaattgagggttagaaggtttagaatgttggatagtttagtggtatttgttagggagttttaggtgtttgaaagaggtgttgtatttttggtgagtttaggatttatttttttggatttgtgttttggagtgtttgtgggtttgggtttaatttttgtttttggtaggtgttttttttttttgttgttaatattaggagtgttgtttttgtggtaatttattttatttttagaagtttgttttgggattgaagtgttagggttttgtgtgtttttttatgtattgttttttttagtgtaaagttttgtagatatgtttggttgaaaagttttagtggttttaatttttagattttgtttttgtgtttggttggaaaattatttgggatttggttgttgtttaaggttgggggaaagttttttttggaggatgtttattattattatttttttttaggtttatttgggtttaaataaatgttaaagtttaaatgaatttgagaaggaatagtgaggtagtggatgttgttattttgtggatgggagagttatgtttattgtaggtgtggatattgtattgataggtattgattattgtaaaattgtatttagtattaaatagaaatagttttgttttttaatttttatagaatgtttaaatttagtttagggagttagttggggtgttttaataaatatgtttttgagaattagtgatgttttttttataatgaaagttaattgttgtataataattgggttaaagaattttgttagtttaaattttaaaaattagtattgtattttgtttttaagtttgggtggtaagtattgaaggggagagggaagtagtgtttgtgtggaaggaagttttgttttttgtttaaatatgtgggatttgggtgtttatttttttagttgagagttttttgtaggtttttttttaattttttgtatttttttatttttattttatttgtggtgtttgggttttatttttgtttggtgttttttttttagggtgagtagaggtttttgagtgattggtttgttagaggtagttgtagagttggtgttttgtagggtagggtagggttgggttgttgggttggtttagtgtgtgtgggttttttttggttttagttagttgtgggagatgttattttgggtgatagtggtgagatgttgttgtttgtaatttttgggtgggtaggattgtttgttgtttttgtggtttttggggtagattttttaggagtttttttttttttttttttgtttgggggttgggattgtgttgtgtttatggagggaattgggtgtttttggtgtattggggttttagttgtatgattttagtttagattttaagttttagtggggtgtaggtgggatgggatgtgtttttaggagatgaggagattttggttgttgagttgttttttaaatgtgtagttttttaattttaggtgatatttgttttttggaggaatgagtgaaggttgtttaggtgaaagaggggtgggttttagtatttggatttttttttttagttttgttaattttaggtgtgtttatggtggaggtgatagaaggaaggtgtgttgggggatttaggttttgtaggtttttggttgttaatgaggtattgtttattgattttgtgttttgttttttatagtgtggggtttggtgttgtgttaggtttgggtgtggggtggagttaggttgggattggttgggggttgttttgtttggtgtttgggtttttgtgttggtttttggggaggagttatgataattttttttttattaaggtgtttgggttttttggttattgttaggatatattgtttgggtgtggttttttttgtttgtggagtggttttgatatttgtggtggtagtatttatgtttgtagagttgttgatgtgtgtttagtgatttggatagtaaggtttgtgtgtggtgggggtggtggtagatgtttggttattgtgattttgattttggatttattgtttgggggttggggggattttggatttaattggtgattgttttgggggatgttggatgttatgttgtggaaaataattgataatgttaagtatgaagaggattgtgaggtgagttggggttttggggtgtagttttgttttgttgaggatagtttgggaggtaggggttattggattgaggttggggatgagggtataggagttttggttttttggtgggatgggatttatttttttggatattttttagtttatttttgtggggttttttttttgtatagggtttttttttaaatagtttttttttgggaatgaggtttggaaagagaatggtaaattttatttatatagtttattgggtgtttttttaagtggtaaatagttttgttttttgtttttttggaaaagtgttttgtttgtaatttttagatgtggtttttatgtatgaagtttttgtttaaaggggttagatgaggttatttgttagtgatattttggtggatatttttttaaggttggtttgttatttgttttgttatttttttggggaagtatgaaaataattgaagtttggtttttaaaagaagtgggggttggggagtggtggtgggggtgtttgaggttagatggggttgtaagagtttgtgagtgttttagtttgttggataggttgagttagagttttggagagtgggagggaagaaggaggtggtgagtgggaagaggaagaagatgtaggtagtgttaggtgagtttaggggtgttgggagtgtggagtttgggttatggatttgtgggagtttattgtgtttttgggttttggagggttgtttttgtttgtaggtttgggtgtttttgttaggaggtgatagtgttatgtttttttaggtttttggtgttttgagatttttgggtagatggggatgtattttttagaaattgagttgggttgtttaggggtgagggaatgtgtgtgggtaaggttgtttaatttttagggttttttatgttttttttgtgttttgatgtgtgagaatattgtttttggtagtgtagggtgtttttatttattattttttttggttgggtttggttagtagggagggttgttttgtgtgtgtgttttttttttattttttagggtggtgtagggtggtgggttttgttttttgagtgttgtttgtttggaggtttttgttttgagggtgtggaagggagggttttgggggtgggggaggtgtgtattttttgtgttgtgtattttatttgtgtttgttgtgttgttatttttagtagtttttgtgttatgggtgggttttatgagatagttttgtattgggtgtttggtttttttgttttgggttttggtttttttgttttgggttttggttatggatttttttggtttaagatttagggtttggatttggtgtttttaagtgttttgggtttgggagtagtgtttagatttttgttgttgggttttgagaatttgtttttttaggttttttattagatttttttttttttttgtattttttgtttataatgaaatttttggggtgtattgtttttgggtattttttgattttgggtaagttttgttgggtggggtgtggttggttttttggggttttttgtgtagtttggtgatgttggttagtttgtagtagtggggttttgtattaatggggttttttgtttttttttttttttttaggattgttatgatgggagtagtaatgggaatttgtgggttttttattttttttttgttgggtagtatttttatagttttgtgttattttttttttatattggagttgttgaatattagttgttattttattttttttttttttattagtagttggtttatttttagttggttgatttttatttgtatttgggggaagtgtatgttgttgttattaattttttgtattagttggtgtttataggtagttagtagtaggtttggtttggttgttagagttaggagggagtggggttgtttttgtattatgggtgtttggttggtttattgttttatttttttgggttggaggtgggtgtggtgagtgtttgtagggatgtttattgttgttttgatttgttgttgttttatgtatatgttttggatgttgtgggtttggttgagaatttggggttttatgatatgttttattagatggatgaggtgtaggtgagtggtgttgtggtttttgattggatttgtttattttatggttttttgtttttattttgtatttttttaggtttttttgaatttaagggaattttgtttttttttttttagaatgttgatgattagtatttgttgttgta

SEQ ID NO: 56 - DNA, 6709 bp, Artificial Sequence
  chemically treated genomic DNA (Homo sapiens)
tgtagtaataggtgttggttgttgatattttgggggagagaggataaaatttttttaagtttgggggagtttagaggagtgtggggtgggggtagaaggttgtagggtgaataggtttggttaggagttgtagtgttgtttatttgtattttgtttatttggtgaggtatgttgtggagttttaggtttttggttaggtttgtggtatttagggtgtgtgtgtggggtagtagtaggttggagtggtggtaggtatttttgtgggtgtttattgtgtttgtttttagtttggagaggtggggtagtaggttggttgggtgtttgtggtgtgagggtagttttgtttttttttggttttggtggttgggttaggtttgttgttggttgtttgtgggtgttggttggtgtagggggttgatggtggtggtgtatgttttttttagatgtgagtaggggttggttgattgggagtaggttagttgttggtagggagggggaaagtagggtggtggttgatatttggtgattttagtgtgggagaggggtggtgtggggttgtagaggtgttgtttggtggaggagaggtgggggatttgtggatttttattgttgtttttgttgtggtgattttggagggaaaaaaaaaaataggagattttgttagtgtgaaattttgttattgtgaattggttggtattgttgggttatgtagagggttttgggggattaattgtattttgtttggtggggtttgtttagggttggaaggtatttgggggtaatgtgttttgaggattttgttgtaagtaaagagtgtggggagggaggagagtttggtgaaagatttgggggaatgagtttttaaagtttggtggtgaaggtttaggtgttgtttttaagtttgaggtgtttggaggtgttaagtttgaattttgggttttgggttagaaaagtttgtggttggagtttggggtgaaggagttagagtttggggtgaaggagttggatgtttggtgtagagttattttgtggagtttgtttatgatgtagggattgttggaggtggtagtgtggtaggtgtggatagagtgtgtggtgtgggaaatgtgtattttttttgtttttgggatttttttttttatgtttttgggataaagatttttgagtgggtggtgtttggaaagtagggtttgttattttgtgttgttttgggaagtgaagagggagtgtgtgtatagggtggttttttttgttggttgggtttagttgaggggagtaataagtgggggtgttttgtattgttaagggtagtgtttttgtatgttggggtgtagagggggtatgaagaattttggaaattgggtagttttgtttgtgtatgtttttttgtttttgggtggtttgatttagtttttaaaggatgtgtttttatttgtttaggggttttggggtgttgggaatttggaggaatatggtgttgttgttttttggtggaagtgtttgggtttgtgggtaggggtagttttttagggtttggaggtgtagtgaatttttgtgagtttgtagtttgagttttgtgtttttggtgtttttgagtttgtttagtgttgtttgtgttttttttttttttttgtttgttgtttttttttttttttttattttttgaaattttagtttaatttgtttgataggttggagtatttgtgagtttttatggttttatttggttttgggtatttttattattattttttagtttttattttttttgaaagttaaattttggttgtttttgtgtttttttgaggaggtagtggggtaggtgataagttggttttggaggagtgtttgttaaggtgttgttagtaggtagttttatttgatttttttggatagagattttgtgtgtaaaagttatgtttgagggttgtagatggggtatttttttgagaaaatgggaagtagggttgtttgttgtttaggaaagtgtttggtaagttgtgtgggtgggatttgttattttttttttaggttttgtttttgaggggaggttatttaggaaaaggttttatataggaaaggggttttgtagaaatggattaaggggtgtttggagaagtggattttgttttattgagaggttagggtttttatgtttttgtttttgattttggtttagtggtttttgttttttggattgtttttggtggggtggggttgtattttggagttttagtttattttgtagttttttttgtatttgatattattggttattttttataatatggtgtttggtgttttttaaaatagttgttagttaaatttaggatttttttagtttttaagtggtaaatttaaaattggggttatggtgattaggtgtttgttgttgtttttgttgtgtgtgggttttgttgtttgggttattggatatgtattggtggttttgtgagtgtagatgttgttgttgtgagtgttaagattgttttgtggatggggaaagttgtgtttgaatagtgtgttttggtgatagttgggggatttgagtgttttaatgagaaggaaattattataatttttttttgggggttggtgtggaggtttaggtgttgggtggggtggtttttagttagttttagtttagttttgttttgtatttgggtttggtgtagtgttgagttttatgttgtgagggatgaagtgtggagttagtgggtggtgttttgttgatagttgaagatttgtgaggtttgggttttttgatgtgttttttttttgttatttttattgtaaatatatttgagattggtagagttgggggaagggatttaaatattgaaatttattttttttttgtttaaatggtttttatttgtttttttaaaagatggatgttatttggagttaagaaattgtgtatttggggagtgatttaataattggggtttttttattttttaaaaatatattttattttatttatattttattgaggtttaaggtttgagttgggattatgtagttggagttttagtgtgttagagatgtttagttttttttgtgggtatagtgtggttttggtttttgggtgggaggagagaggaagggatttttggggagtttgttttaagggttgtagaggtagtagatggttttatttgtttaggagttgtggatagtggtgttttgttgttgttgtttgaagtggtattttttgtggttggttgaggttagggggaatttgtgtgtattggattagtttagtggtttggttttgttttgttttgtggaatgttggttttgtagttgtttttggtgggttggttatttagaagtttttatttgttttgggaaagaagtgttgggtaggaataaaatttgagtgttatgggtaaggtgagggtgaggaggtgtaggaagttgggagagagtttgtagagagtttttgattggagaggtagatatttaggttttatatgtttagatagaaaatgaaatttttttttatataaatgttgttttttttttttttttggtatttgttatttaaatttgaaagtaaagtgtaatattaatttttaaaatttaaattaatgaaattttttggtttagttattatgtagtaattgatttttattgtaaggggaatattgttaatttttgagggtgtatttgttgggatgttttaattggttttttgggttggatttaaatattttgtggggattagaggataagattatttttatttgatattgaatatgattttgtaataattaatgtttattagtatggtgtttgtatttgtagtagatatgatttttttatttatggaatggtggtatttattgttttgttgtttttttttgggtttgtttgaattttagtatttatttagatttaggtgggtttaaaagaaaataataataataggtgttttttaagggaaatttttttttggttttagatagtagttaaattttaggtgattttttgattggatgtgggaataaaatttggaagttgaaattattgagattttttggttaagtatatttgtagggttttgtattaaggagaatagtgtataaaaagatatataggattttgatattttggttttaaaataggtttttgggggtaaaataagttattgtagaagtagtgtttttggtattagtggtgggggagggggatatttgttagaagtagaaattagatttaggtttgtaggtattttagagtataggtttaggaagatgggttttagatttgttagaggtgtggtgttttttttgggtgtttgggattttttgatgggtgttgttgggttgtttgatattttgggttttttagtttttggttttattttttgatttggtttgaggtgtagtttgaataagttgttttgtttgtgttggtaagtttattttttgtatgttggggtttggaatgggtaagaaggtgtttattttttattttaggttttggttttttttttttatagtaatattagttaaagttgtttggaggaattgatatgtttttttgtttgggagtgtttatgtaggaggtgaagggagttgatgggtattgagggtttgtgtagtattgtgttgtgggtttaaaggatttagaggatttggaattgtttggtaaaggttatttatttttaaggagtttttttggattttggtgttgttttttttttaatgggtaagtgtttgaattggagtgtaatttttgtgttttttgtatggaaggtagttagaataaattttttgtttttttggtatgggagatttttttttaatatgtatatttttggtttttgggttggtatttaggtatgtgtgtgtttttgtgaggaagttttaatttttttttgattttaatttttttgtttagtagagttgggaattgaaggttttagtatttaagatagtttttttttaatgtttttgttttttgtttatgtgaagatgtggattgtgtggttgtgtttaagatagttggtattggtagaaggggatttttttggaattttggaggttttgtagttgtttggagaagaggatggaaggttgttgggggtttttttttattgttttttagggagtttaaatttatttattttttggaagttttggatttatgtttttatgaaattgtaaattaggtttttgtaatagtgggagtgttttaatagtgtgttatttttaaagaggtgtgaggtggtgtttttggaaatagggtttttggttttaggtttgagttatttgttatttttgtttttattttagatggaagaaggtggttaggtgggtagagtaagatttgggtagatttgtgatttttttttttgttttagggaggggatttttgagtagaagatggaggtttttgagtgtttttgtagattttgtgttatgtgttggatgtttgttttgttttttgggataatgtgagtgttggtagggattttagtaagtggtagatttgttaggattaagtaaggtggaaaggttggggtttgtggtaaatttaggaggagggggtatttatgtttgttattttttttttgtggtattggtatttattggattgatattggtgttaaagggtattttgaagtatttatgtttagtaagggtatgttttggggtattatagatattaagttatagttattttaaaataattataaaaatgattattgtaaataatagattgttttaatagggtgtgaagtggttgttgtatatagatgtttttggttttagttttattagatttagtttattgtttgtttttttgtgttttgtgttaggttgtatgttttttgtttagaattttttgagttttaatttttttttttaaataatttttttttttaaataggtaaagtgaggtgaggagttgaggggtttataggtttttaagtttttgaggagggtttgggtttatgttagttttggtttgttaaatgagattttgtgggtatagtttttaatttgataattatttgttttattttatagtaggtaaaagtgaatttttagttgtttaattatttgaaagttataaaggtgtttagggttgaaggttatttttttagtggttttattagggagtttgttagagatatgtttgattttttttttgttttgttttgggggggatttttgtttgttggaggttttatatgtttggttgtgggatggtagatttttgttatttttttattaatattttggagtttatttgtatgtattttaattgtttggagtgtaggtttgaggattaaggtggtagttttgtgttttttgaggttttttttgttttgtgttttgggttgttatatattttttggttaagtttggtgtttttaatttagaatttggttgtttttaggtgtggagtaggttattgttgttagatgttgtgtggatttgtttttttgtgttagtattgggtgataggtagtttgggtagtatttaggagttattttgtatggttttaggtgtttgttttatttagtgttattttttgttttttgtagtgagtttttttgtagttttttttttttgttagtttttggggttgtatttgttttttatatagatatttttttttttatttgtaggaattggaagtttatggtgttagttttttaattttttgtgagttgaggagtttaagagt

SEQ ID NO: 57 - DNA, 2296 bp, Artificial Sequence
  chemically treated genomic DNA (Homo sapiens)
gttattgtattttgttaatattttttaaaagtaaaaaataaattaaaaaaaaagtttttagtggattgttgagttttttttgataggaggtattaaatgtgttttttttgaggataggggaagagtttattatttagttatatttttgtatattttataaaatttatttttattaaggatgtttttttataaaatgaggagtagtataaagaatatttaagaaattaggtttgatttagggtttttgatgttggggtaggttttttgtgtgttaatattttaggggattttgttgtagttttttgaatattggttgtgagttttttaattttagttgagttttagtattttttttatattatttattttttttgtttgtttttggtgtgtttagataattggaatttttgttgatattttaaatgggttggttatttttttagtgtggaggtatttagtataaggtgtgatagattagtatttgttgatgagtaataaagttattttggtaaattggattttttttttgaaatgttttggtttttatatttttaatgatgggttaagaaatagtttttaagaagaaggggtggagatagggggtaggattttgtttgaagtttttaagttgattttgtttgtagttatttaatttattagggagggttggatttgtttttttgtggtggattttttgtatttttagaaagtgtaggggtggagaattaatttagttttttttttttttataagagttttgttaggttagtttgtatgaggagggtatgtgtatatttttaaaaggattggtgtagttatttttttaagtttatagttttagtgtgagtttagggtttagatttggggtttttggtgttttaggtgtgagttaagttttttgagtaagaggttttatgataaattagttggagtttgggggttatgaaagtattggttatggtagaaattattagtttgttattgtttatgttgttttgtttaaaaatgatattgtgtaagggattttgttaatttttaattttgggagattatttattatttggttgtggtttgttgttgaataggaaagtattttgagatgttaagagattaaaaggtttgtaattgttgtttagaaatgaaaatggttttaaattataattagagatggaagtgtgttttaggggagggtggggtgttgtgtaattgagttttttatgtgtaaggtggatataaatggtttatggatgtgggtgaaggtttttagagtaaagaatgtttatttttattagattaaaatatagtttgggaaaataattatttgtttgagattttgggaaagtaaaattttttggtttttttgttaggaagaatgattgtaaaataagggttgagaattttttaaataagattttagaattttatttaaatagttgtagtttatttttgaggagttttagatttatttgggtttgatggatgttgtaatattaagtttgaggtttttttagtttggtgttaagagtgggttttaggggataaatagagaatagttgtttttttaattggagtagaaaataaaatttttttttttttttatttttaatttttttgttttgttgtgaaattgttattgtgtttttgaggagtgattaaaattttagttatgattaatttaaagggtaggtttttaggtagggaagggaaaggggtttaaggtaaaaaaaaaaaaaaaaagttagttgaagtgagtttatggaggatttggggattataaaagttatgggatttgagttaattaaaattaatggaaaagtattaatatgtaatttaaaaaataataataaaataaagtagtaaggatatttttggtttgttttttgtttttatttttgagtttgtttgggaattttggagtagattttttgaagtatagtatgagtgtttaatggttgttttaatttatttttttgttttttatatataaagattttgtaatggagagtgggaatgaatggtttatttatttttgaatattttttgtgagttgggaatgtgtttagtaaggttgttggagtggagggaaaagaaaaggtgtttgagttttttagatatgggtagaaaaggagagaatttgagataggttgagagaaagttgttttggttggtagtattgttagatttttagatatattgtatattttagtttttgaaaaggttattttgagtttttttagggtttttggggtttttattttattttaaatatttggaattgtttgtgtttgttataata

SEQ ID NO: 58 - DNA, 2296 bp, Artificial Sequence
  chemically treated genomic DNA (Homo sapiens)
tattatagtaggtatagatagttttaaatatttgggatgagatgagagttttaggggttttagagggatttaggatggtttttttgggggttggaatgtatggtgtgtttgagaatttggtaatgttgttaattggagtagtttttttttagtttgttttaaattttttttttttttgtttatgtttagagaatttagatatttttttttttttttttattttagtagttttattgagtgtatttttaatttataggaaatgtttaggggtgggtggattatttatttttattttttattgtagaatttttgtgtgtgaagggtaggaaaataggttaaaatagttattgggtatttatgttgtgttttaggaagtttgttttaagatttttaagtaggtttaagaatggaagtagagagtaagttagaaatatttttattgttttattttattattattttttaaattgtatgttggtgtttttttattaattttaattgatttaagttttatgatttttgtgatttttaaattttttataaatttattttaattgattttttttttttttttttgttttgaattttttttttttttttgtttgggaatttgttttttaaattggttatggttgggattttaattattttttaaaggtgtagtgataattttataataaagtagggaggttgggggtgggaaggggagggagttttgttttttattttgattaagagagtaattgttttttgtttgttttttggggtttatttttggtattaggttggggagattttaaatttggtgttgtaatatttattagatttaagtgagtttggggttttttaaaggtgaattgtagttgtttggataaaattttaaaattttgtttgggagatttttagtttttgttttataattgttttttttggtaaagaaattaggaagttttatttttttaggattttaggtaggtaattgtttttttaaattgtattttaatttgatggaaatggatattttttgttttgagaatttttgtttatatttataaattgtttgtatttgttttgtgtatgggaggtttgattatatagtgttttgtttttttttgagatgtgtttttatttttggttataatttagggttatttttatttttaaataatagttatgagttttttagttttttggtattttggagtgtttttttgtttagtggtggattatagttaggtggtgggtgattttttgaggttgggaattggtaaaattttttatgtggtgttatttttaagtaaagtagtataaatggtgatgagttggtagtttttgttataattaatgtttttatggtttttaggttttaattgatttattatgaggttttttgtttaggggatttggtttatgtttgaaatattagaggttttgagtttgggttttgagtttatattgggattgtgagtttagggaagtggttgtattagtttttttggaggtgtgtatgtgttttttttatgtaggttgatttggtggggtttttatggggaggaggggggttgagttaattttttatttttgtattttttggagatgtggagagtttattatagggaggtagatttagttttttttagtgaattaagtgattgtaaatagagttagtttggaagttttaggtagggttttattttttatttttgttttttttttttgggggttgttttttgatttattattaaaaatgtaaaagttaaaatgttttaggggaaaagtttaatttgttagaataattttgttatttattaataaatattgatttattatattttgtgttaggtgtttttatgttggagaagtagttagtttatttaaaatgttagtaaagattttagttgtttaaatgtgttagggataggtaaggaggataagtggtgtgaggaggatgttgggatttagttgaagttggaaagtttatagttggtatttagagaattgtaatagggttttttgggatattagtatgtggggaatttgttttagtattagaggttttgggttaggtttggttttttaggtgttttttgtgttattttttattttgtggagaggtatttttggtagaagtgaattttgtaaaatatgtaaaggtatggttgaatagtgaattttttttttgtttttaggaaaagtatatttggtattttttgttagaggggatttagtaatttattaaagattttttttttaatttattttttatttttgaaaaatgttggtagggtgtagtgat

SEQ ID NO: 59 - DNA, 4247 bp, Artificial Sequence
  chemically treated genomic DNA (Homo sapiens)
ttttaaaaaaattaaaatataaaataataataattattaaaaattttatttttgtttttttaaataaaaaatttattttaaaaattttaatttaaaaatttaaaaatgaaaaatgtgtattataatttttaaaaatttttgaatttaaaaatgatttttgttttttgttttttttgtgtgatgaaattgaatttattaataaaaatttgaaataaaatgaataaaaatgaaatgaaatgaaattatgaaaaaataattgatgaattgtgttgtgaattaatattttaaaaaatgtgaaatttgaataattgtgtgttaaaaattttgaaatgaatgttgtgaaatttttttgaattataaataaatgattttatgatgtgatttgaataaaaatttgatgattttataaaaaaatttaaaatattgatgttgaattttttttaatttttgtaataattgatatgttatataaaatgaaaaaaaatttgaaataaattttgaaatgtgaattaaaaaaaatgaatttgatttgtgattttaatgttttttgattgatgtgaaaaaaataaaattaaatgtttgtgtgaattttgaaaaaaaaaaaaataaaaaattttaatgattaaaaattttttgaatgtttattttgaaattttttttgttgttttttatttaaaatatattgaatttgatatgattttattgttttattttttattatgatttttattttgaattaaatttaattaatttattataataattattgataattgtttttttgttttgtaatattttgtaaattttaaaattgtgatgttgttgaatataaattttgaatttaaaatgtgtgatttttttttttatgattgttgttttttaaaaaaaattatgtgaatataaaaaatttatttaatatgttttataaaatttattattttttttttgattgtgaattatgttgataatttgaaaaatttgattttttgttttttatttttttttttttttttttttttttttttttttttttatttttttgtttatttgttgtaattttataaaaaaaaaattgtttttttaattattttttttttttattttttatatatttttttatttttttttgatttataaaaaaaatgaaataatgattaaaaaatgttaaaaaaaaaaaataaaaatgtaaattatgaatttataaatgatatttgattttgtgtttgatgaaaattatgaattaatttgaatttgtgttttgtttttttgtgatatttaaaaattgtttgaattaaaattgtgttattttttgtttaatgttgatgtaataaaatttatgtgatataaaatttttgaaaatttaaaaaattttaaaatgttatgaatttaatatttttttatttataaaattttaaattaataaaaaatattttgtgaattttaaaaaaaaataataaatattttttattttatttgaatttttttaataaaaatttatatgtatgataatgttattatgtttataaataatgttaaaatataaaaaaaataaaaaattgaaatttgaaaattttattttgtaataaaatttaaaatttaatttaaattttaaaaatttgtttaaaatttaaaatttaatataataaaaataaaaaaaatttttgataatttatttttataattaaaaaatgttaattaatatttttaaatttttattttgtaaataaaataaaaatatatgaaattatttaaaaaatttttattatttgttattattaaatataatttaaattttgtaaaaaaaaataattttattttaaaattaaaatttttaaaatattttaaaatttgataaaaaaaataaaaaaaataaaatttaaaaattaataattttatatttaatattttttgtatttttttttttttttatattttttaataatttttataattttaattatttttaaattttattttttttgtttttttttaaattaaaatattaaaattaaattataatttaaattatatttatattttattaaaaaataaaaattttaaatttattgtgtttttttttattattaattttaatttaatatttaataaatttttttttttaaattattaaaataaatttgtgtaaatttgatttaattgttgtttttgaattattgaataaattgattgttttgttgttttaaaaattatttttattttattttaatttaaatttaaaaaaatttaaattaataattttaattgaaaaaatgaaatgatgtttattaattattattaaaattattattattattattataataattaatgtaatatttttaattgataattttttataaaaaaaaatattattttttttttattatatttaaaataaataaaatgaataataaaaaaataaaaaaaaaaaaaaaaaaaaaaatatatatttttaataaatttttaaatttaaaaattatataattttatattaattattatttttttttaaataataaaaatttataaatttattatgtttattttatatttaaaaaattaatatttttgaaatatttattaaataatgaaatattttaaaaaaaaaataaaataaataaatttttaatttttttattaaatttaattataatttataaaaaaaattttttttttttttttatttttttttattaaaaatattaaatatattaaatttaatatgtttattttataaataaaaaaaaaaaaatataaaattaataattaatttaataaaaaatataattatataatattaaaattttttattttatttatttttttaatttatttttatttatttttaatttaatatttaataaaataaaaatttattaatttttttgtatttatttattatttaattttataattattttttaattttaattaaattttgtaaaatattttaaatttatttttaataatttttaattattgtttgattatttttatttttttatttttatatatttatttttattttgttaaattaattaaattttaattaaaattaattttttatttttttaaataataaataataattttttaaataaaattttaataaatattaataaattttttttttttttttaaaattataaaaataatattttttatttaaaaataataaattttttaaattttttttgatttaaattaaaaaaattaatttataaaatataaaaattatatttttttttgattttttttttttttttgttattatttaattttttaattaatttttttttatttttaaatttaaatattttaataattaatataaatttatttttattaataaaataataaaaatgatatattaaaaaattatatatttatttaaaaaaaaaaaataaatttatattttttaaatataaataaaaaatttaaaatttttttatttttattaaaaaaaaaaaaatttttaatttttaaaaattaatgttttttaaaaattaaattattttaattttaaattttaattttattataaataaattttataattttaaataaattattaaatttttttaaattttaaatattatatttattatatttaaataattaaaaaaatttaataatataatattatataaaatatttaatttatattaattaaaatattaatttaaattgataaaatatataatttaaaaataaataaatttataaaaatattttttattaaaaataataataaattaatatttttaatattaaaattttaaaatttaaaaattaaatttaatttaaataaaaattataaaattaaaaaaaaattaaatttataatataaaaaaaattttaaataatttttttatttaatattttattgtattttttttttatttaataaaaaattaaattattaaaaatttaaatttattttttaatgtaattatttaatttattttgattttttttttaataataaaataaaaaaattgtaaaaaaatttttataaaataaattattattattaaaatttttttaatattattttttaattatataaaatttaaaaaataaattaaaaataaatttttttaaaaaaatataaaaattttttaaaaaaaaatttttaaaaattataaaaaaaaatttaaattataaaaatatataattttaaaaaaaaaaatataatattataaaaatattatttttttttaaaataatttttaaatttaaatata

SEQ ID NO: 60 - DNA, 4247 bp, Artificial Sequence
  chemically treated genomic DNA (Homo sapiens)
tgtatttaaatttagaaattattttgaggagaaataatatttttatagtattgtatttttttttttaggattatgtgtttttataatttaggtttttttttgtagtttttagaagtttttttttaaaaagtttttgtgtttttttggggaggtttatttttagtttgttttttgagttttgtgtagttagaaaatggtgttagaaaaattttgataatagtagtttattttataaaagtttttttgtgatttttttattttattgttgggaagagggttgaggtaggttaggtggttgtgttagaagatgagtttgggtttttagtgatttagttttttattaagtagagagggggtgtggtagggtgttgggtaggaggattgtttgaggttttttttgtgttatgagtttgatttttttttaattttatagtttttgtttgagttaagtttaatttttagattttaaaattttagtattgaagatgttagtttgttattgtttttagtagaggatgtttttataggtttatttgtttttaagttatatgttttattgatttaaattagtgttttggttggtgtgggttaggtattttatataatattgtattgttgaatttttttagttatttagatataatagatataatgtttgaggtttagagaggtttagtaatttgtttggggttatagagtttatttatggtagagttgggatttagaattagggtagtttgatttttgagagatgttgatttttgagagttagagatttttttttttttaatgggagtagggagattttaagttttttatttgtgtttagaggatgtaaatttgttttttttttttaagtagatgtgtagttttttagtatattgtttttgttattttgttaataagagtaggtttgtgttgattgttaaggtatttaggtttagggatgggagggggttggttagagagttgggtagtagtggggagagggggagggttgggaaggggtatggtttttatattttatgaattaatttttttggtttgggttggggagggtttagaggatttattatttttgaataaggggtgttatttttataattttgaggaaggaggaaagatttgttgatatttattgagattttatttaaaaaattgttatttgttatttgagagagtagggggttagttttggttagggtttaattaatttggtgaagtaaaggtaggtatgtaaaggtaggaaggtgaaggtagttgggtggtggttgagagttattgaagataaatttaagatgttttatggggtttagttaggattagaaggtagttatggggttaggtagtgggtggatgtggggaagttagtgggtttttgttttgttagatattaagttggaagtagatgaaagtgggttaagaggatagatggggtaaggggttttagtattgtatggttgtattttttattaagttggttattggttttgtatttttttttttttatttataagatgggtgtgttagatttaatgtgtttaatgtttttagtagaaaaaagtgagaagagaaaggaggttttttttataaattatagttaggtttagtgagaagattagaggtttgtttgttttgttttttttttaaggtattttgttgtttagtaggtgttttggaaatattagttttttgggtgtaggatgagtgtaatggatttatagatttttgttgtttagagaggggtagtgattagtataaggttatatagtttttaagtttaagggtttgttggaggtatatatttttttttttttttttttttttatttttttgttgtttgttttatttattttgggtgtgatgggaaggaagtgatatttttttttatgaaaagttattgattgggaatattgtgttaattattataataatggtaatagtagttttaataataattagtagatgttgttttgtttttttggttgaggttgttggtttaagtttttttaagtttgagttggagtaaaataaagatagtttttgaagtggtgaaatggttggtttatttggtagtttgggagtggtggttaggttgagtttatgtgagtttgttttagtagtttggggaggggggtttgttaagtgttgagttggagttagtagtgagaagaaatgtgatgggtttgggatttttattttttaatagggtataggtgtagtttaagttatagtttaattttagtattttagtttgggggagggtgagagagatagggtttgggggtagttgaggttataagagttattagagggtatagaaagggaaggaggtgtgggggatattgaatgtgaggttattaatttttaagttttattttttttgttttttttattgggttttgggatgttttaaaagttttagttttaggatgggattgtttttttttatggagtttgggttatatttggtggtgatggatagtgagagttttttagatggttttgtgtgtttttattttatttatggggtagaggtttagaggtgttagttgatgttttttaattgtagaagtagattattggaggttttttttatttttgttatattaagttttaggttttaggtgggtttttaaggtttggattgggttttgagttttgttgtggggtgaagtttttgagttttgattttttattttttttgtgttttagtgttgtttgtaggtgtagtgatgttattgtgtgtgtgggtttttattagaggagtttgggtggggtaagaggtatttgttgtttttttttggggtttgtggagtattttttattggtttaagattttgtaaataaagggatattggatttgtagtgttttgggattttttgggtttttgggggttttgtattgtgtaagttttattatgttggtgttgggtggagggtgatgtgattttagtttgggtgatttttagatattgtggagggatggagtgtgggtttgggttggtttgtagtttttgttgagtgtgaagttgggtattgtttgtaagtttgtagtttatgtttttgttttttttttttgatgttttttagttgttattttgttttttttgtagattgagggaagataaggggatatataagggataggagaggagagtaattagggaagtgattttttttttgtggggttgtggtgggtgggtggagagataggagaggaaaagagaaaagggaagagaaggaaggggtagggggtgagaagttgggttttttggattattggtgtagtttgtggttgaaagaggaatagtggattttataaagtgtattgagtaagttttttatatttgtgtagttttttttaggaaatggtggttgtagaggaaagggttgtgtgttttggatttggagtttgtgtttggtggtgttgtggttttgaaatttgtgggatgttatggggtggaggggtggttgttgatagttgttataataaattagttgagtttagtttgaggtggaaattgtagtaggaagtgggatgatagagttgtattgggtttggtatattttaggtaagagatggtgaaaagagttttgagataaatgtttgggaagtttttggttgttaaaattttttgttttttttttttttgaagtttgtgtggatgtttagttttattttttttgtgttggttggggagtgttgaagttgtgggttgggtttgttttttttggtttgtgttttgaaatttattttgggtttttttttgttttatatagtgtattgattgttatgagggttggaggggatttggtgttggtattttgaatttttttgtagggttgttgagtttttgtttgggttgtgttgtagagttgtttatttatggtttggagaggttttgtggtgtttgttttgagatttttagtgtgtggttgtttggattttgtgttttttgagatattggtttgtggtgtggtttgttggttatttttttgtagttttgttttgttttgtttttgtttgttttattttgggtttttattggtaagtttggttttgttgtgtggagaaggtggggggtggggattgtttttgagtttggggatttttgggaattgtagtgtgtgttttttgtttttaggtttttagattggagtttttggaataggttttttatttagaggagtggaggtaggatttttagtaattattgttgttttgtgttttagtttttttggag

SEQ ID NO: 61 - DNA, 20 bp, Artificial Sequence
  chemically treated genomic DNA (Homo sapiens)
ggagtggaggaaattgagat

SEQ ID NO: 62 - DNA, 22 bp, Artificial Sequence
  chemically treated genomic DNA (Homo sapiens)
ccacacaacaaatactcaaaac

SEQ ID NO: 63 - DNA, 33 bp, Artificial Sequence
  chemically treated genomic DNA (Homo sapiens)
tgggtgtttgtaatttttgttttgtgttaggtt

SEQ ID NO: 64 - DNA, 22 bp, Artificial Sequence
  chemically treated genomic DNA (Homo sapiens)
aaccgcaacgactaacaacgaa

SEQ ID NO: 65 - DNA, 21 bp, Artificial Sequence
  chemically treated genomic DNA (Homo sapiens)
agggcgtttagttaattcgcg

SEQ ID NO: 66 - DNA, 30 bp, Artificial Sequence
  chemically treated genomic DNA (Homo sapiens)
cgcgacgacaaaacgccctttaaaaacgaa

SEQ ID NO: 67 - DNA, 20 bp, Artificial Sequence
  chemically treated genomic DNA (Homo sapiens)
cacgcacgatactaaacgcc

SEQ ID NO: 68 - DNA, 20 bp, Artificial Sequence
  chemically treated genomic DNA (Homo sapiens)
tcgatcgtgttggttgttcg

SEQ ID NO: 69 - DNA, 27 bp, Artificial Sequence
  chemically treated genomic DNA (Homo sapiens)
cgaccgcctaccgcttcataataacgt

SEQ ID NO: 70 - DNA, 21 bp, Artificial Sequence
  chemically treated genomic DNA (Homo sapiens)
acccgataaaaacatcgcgta

SEQ ID NO: 71 - DNA, 22 bp, Artificial Sequence
  chemically treated genomic DNA (Homo sapiens)
gttcgtgcgtttgtagttcgat

SEQ ID NO: 72 - DNA, 23 bp, Artificial Sequence
  chemically treated genomic DNA (Homo sapiens)
aacgcgaccaacgcttcaacgac

SEQ ID NO: 73 - DNA, 24 bp, Artificial Sequence
  chemically treated genomic DNA (Homo sapiens)
tttttgttaagcggtttcggattt

SEQ ID NO: 74 - DNA, 22 bp, Artificial Sequence
  chemically treated genomic DNA (Homo sapiens)
ccgcctaaaaacgtctacgcaa

SEQ ID NO: 75 - DNA, 29 bp, Artificial Sequence
  chemically treated genomic DNA (Homo sapiens)
taaaaactcgcgcaacaccgtaccgtaaa

SEQ ID NO: 76 - DNA, 30 bp, Artificial Sequence
  chemically treated genomic DNA (Homo sapiens)
gttagtttttttttgtcgtttttttttcgt

SEQ ID NO: 77 - DNA, 22 bp, Artificial Sequence
  chemically treated genomic DNA (Homo sapiens)
tcgcctaaactcaactacacga

SEQ ID NO: 78 - DNA, 21 bp, Artificial Sequence
  chemically treated genomic DNA (Homo sapiens)
gcgttcgggagtttcgtgagg

SEQ ID NO: 79 - DNA, 4513 bp, Homo Sapiens
agtgtatggggaaagaccaatccaactgtccatctgtggctgggacagcccagggggtgtgcccacggctgacccaggggtgtgcacacggctgagctgggagtcccgctggtctccctgaggactgagggtgaacttcgctctttgccttaaacctctttatttcattgcagtaatagttttacgttgtacataatagtgtaaacctttttaaaaaggaaagtataaaaacaaaagttgtaatttaaaagtctgaataaccatctgctgcttaggaaactcaatgaaatgacatgcctttttagcaggaagcaaagttggtttctgttttttgttttctttgttgttttagtttataaaacatgtgcattttacagttccagtatcaaatatttataatcttatgagaaatgaatgaatgtttctatttacaactgtgcttatcaaaattgtgaacacccccacccccgcatttttgtgtgttgaaattcttgaaggttacattaaataaaacaaaatctctttattataaaatactgaaggtcccaggtggaatgatgagttttctaagcatgtctgagtccagaggaactgcctgggcatcctccccagtactcaggtgctcatggccttcgccccgcctgggagcaggtgccaggtgcctttgtagcgagaggtgattattatttttttttaaataagacagtttggatatgtcacatgtgagcacagaataaccaaaagaagtacacattttgttaccaggaggaagtgttcaaaactacggtgctattccagtgactacatttttttaaattttgcgaagttcaacaggtctccctccggctgggtgctcactggccctgccacccgtgctggaccgaggcgctttcccctggggacaggaactttttactccactgagacaaagagactctccttttcaaagtgtcatttttgtttaccttttgttgtttcccccccaaaacaaaagactttgtacaacttcctaagcaggattgggggagggatcagcttcgcctgtgctgaccgcgcctctggattccgctcatcaggaagtgtttggggtctttgagcgagtgatctacgcgttgaattgctgtttttccaaactttcatggcttaaaaattttttttcttctccctgtaaaagaaactcagagactggtgatctgttaccgaagacgactttttaggcgttttctgtttccccaggcagctgggccgttggcgttcccaggcggaagcggggcctctgggctgggcctctgccctgccaggaagcggtctgggggctgcccctcgggattttcagaaccctggaaggagagagctggggtctcaccgcggagactcccgagttctcgttgcctgggcccgagctgcgccccagggtcatcgctgatggcgcgagaccacgcattccccgcgaaccccgacttctgaacagttcagaaagttcgtagattaaaaaccaaacaaaaaatactggcacaacttctattgccgtattggcctctctcttattttaataaaaatacggtaacatgaagcgatcatttttttaaaaatctgttttcaaagtataacactgaaaaggggcaaggcacagctttgtaaggtaatgagttccccgtcctcagaggtgttcaagcagacgctaggcttacagtggcatggagagtgttctttctctttggaactggatgagtcctcagacccttgaaacgctgagtttttttttttttttttactcctatgtttattacattttaatccaacagcatataatctaagctgctccctcatggagagccgcggctgtgccacctgcctgctttcgccatggagaccggagtcaggcctgcagggaagtcggtgcgcctttcccaagtcctctgcccgctggttcctctcgggcctcccgggctctgcgtgccgcggatctggacccggactgcagacaccgccccacgactgggcccccggccagactgttaccccacaggaggagggttccctaagtgtgcagaagaggaaagctcatttataaagtccttgctccttcgagctgaacgacccccgcgcccgaggcctagctgtgtccccgccgggcccaggctgagcttactccacactgctccatagccgggcagagactccgcgagggtctgggagtcctggcctcggaggacccgccgccctgcaggcctgcccaagcaggcgcccccgcgagagtgcgggacagagagggcctggcggggctccttggcgctgagagccctccttctccgctgcacccagctctgccaacggggctggatgagtgggggctggagtcagaatcccagggtctacacccgccgacagcagcaatgccgacccgccctgcctttctcctaaggagcggagggaaggagccatgtgaatgaccccagcctgaccaccaagagggcgccagcatttctgttttcctagagtgaaaaggtcaaatcgatgggggctcctacaccgctggacacaggtgcgcccgggcgtccagtgcgcgcaacacacgcccagacactctatatgcaaatatgcctgccgccgcggagccggccgggaggcagcgtttgttcgctggggttctgctagaagtcattctgtctcccgctggtttaatatccgccctctgcggtctccgctcgcctcggcggctcccgaagcgcccccgggagggtcccggctccgccgaaaactgcagcctgccaggctgagccgccgcgcgctgggaggttaatagcgactgacgacaaagggccaaggtgcaattcctaaagcggggattcgccgggtgaggcagaaatcagcctccggggagatgggtccccccttcccgacgcgcccctgcacacactgctgccccggcgccgggcctccgggcggggacccctcttccgggcatcgcggccccattcggcggagagctaggccctctccaggcctccaagtagggagcggacgtgggtggtggggaagggaagccgccggcgggacggagagtggggtcccccggaccctgggtcgggcaggcctggcgctggcagctctgttgcacagatttgtgagcgatgctggtggccgcattgccgcgcggcgcgaaccccaagtagaccattcatgtttttattaataatctcaaacacttcattatatttatgctgcctgcccagagaaaataaaaggccattcttgaaatcgcctgaaatgtaataatattcattaaagcgcctcctaattatgtgatttaatcaagcgtggtgcgcccgcgctctcggctctcgctggaaaggctggcgatgacggttattattactgctgttgttagtggcctcgtgatagcagccggccagctcttcagtccaggcccagtttcctcagagagactcggggagccccactttgagggatggggttccccggaacgactccgaagtcccggagaccaggcgcggcccaggccctctgcccttctccagccccagccccagccccagccccagccccgggcaaactcttccaggccgagggcaggactttctccagacccttggggccctctgtgtcccctggggacgcccgacccggctttctaggagggggaactccgggtcctgagcccgggccccgccccgttggctgttccgccccctccagggctgagccccgcgcaatgcccgaagcagaaacaaagagtcgccgagatctgcctcctgggccgccttttcaccccctcagcctggaaggcgtcccagagaggccccacccccagcctccacggagacccaggagggaagaagagccgggacccggtagccctgaggggctgccgggcctgcggcgctttctccgccgcagaggggttgggtgggagacgcaggcgggaaggaccctgtcccagccgagagtcctctgtggggtcgaggaatggtgaggatcactgtttgcaccaaccgtctggaagaaaccgggcggccagccgctcgaccccatctgtcgagatgtgaaacttggccgcgcggtccgggcgcgcgctgcctgcgcggaaggagccgcctccctcctttcagcgaacgcattcggggttcccccctcccgccaagtcctttgtctggaaggggactggcaggctctgtcgtcgccgtgtgcccccctcctttccccagcctctaccccctccaactaactttcctttcttcccttctcttttcttccctctctggatgggtaatcacaggctccgctgccaagcgcgctgcgaggagccgctgcccgttcccgtcggtgcccctccccgcggcagcctggccgagtccgcccagcctgcctaggacgtccctgacccgcgcgctcagtttcattcagtggccgtgggatgttgcatctgagtttttcctttaggccaaaactttgtcccgaggtttttctgagagggttttattctccaaca

SEQ ID NO: 80 - DNA, 2280 bp, Homo Sapiens
tagtggcgagcactcgccgctggccttctagggcaggcagtattgccgctccaggcgtgcggagtcggggagaaaaaaaccgaacacgtgtgctacccagggcccccagataagcccctccgcgcgcacacacaccctgaaccggagtccagaaggccggactcgcgtcccggggtcgagccccttactctccgctcccagttcggaagatcccagcctgcccgaaggcggcgtctgacccgctggtggacctggtgggtgtctgttcctgatacctggggacgaggcgggagcgccttgagcgctgggaagcttcgcctcgcgagtccccggcagtgacacgtgggagcgttgggcccggcacccccgacgcttccgaggtttcgggtggtcgttttgctctctcgggggcttttattccttaagtggctttaaacgaccgaggatgggcctcccgcgccgccgcagctgtcacttccttcgggaaaggctagcgaccttggacgcgcaggctctgaaaaccaaggtccagacccataccgagcgcccaaagaccgcatttgaattctcctcgccggccattgagggagagaaaggaacgcttagttccattcacattcacagaaagaagcgccgagggtgggggaaacgcagtcttgccgggtgagccgggacaggttcctcgcctgccccccggccgctgcttcctcttagctgaatggggagcgacccgccccgggcgcggccttcggggctgaagactgaggtgcagcctcacccccggcctggcagcggcttggaagagagagggaaaggaggaacatctacccggctaagagacgccgccagagtccctaaagctggcgggggacggaggccggggtcccggatcttcagagcgcccgcagccgggcttctgggctcctcggtgcggggaacctgaccctgtagccttcgccagggcgcggcggggctgcaagaagggaggaaggagtgggactagagccttcgagggcgcgggcggcgtgcactcagccttgtctccccgcgcgccctgccgcctgcttgccccctttgctgcaccgggtggccctggtccccgcgcccgcccgcccccgacgccttcgcgtggttccgcgctgcccgcggccagccccgtttcgcttcgcaaggagcgtgttgttttctcaatcgaaatgggatcaagatcccagggtttcctcgtctccttgttttgaggtgataggatcttagccaatagatcgaaaacgtgaaaagtacccgtcgcctcttgtcccaagtgcctctgtggaaggatcatttacttggaaaagcagaataaattctgttgccgttttccttccggaggcgtgctcaccccagagctcctagacccactggcattcgctatacttcctcctgggctttacaggtaggatttcaagaatgatatgggggcacctgggtgatctgtgggttgcaggtcctcaagaggccgttttttcgtgcacggaagtgtcgtagctttattttagcggaagcaatatcaaaccttatcttagaggtttgttttgcaaagaatccagagtttactatatttgacactattttaaaataacacttgcttgttttaagaagttgggagaaatcgataaaagaaaagttgaaatccatgcttcccatttctactctaggagataatcctgatcaacagtttggtttgctccctacccccattccttaaaaacaaacaaacaaacaaacaaaccaaaacccactatacttttagattgtgtaggattacgtaggattttgtaaaaataaaaatgggattatacttcactcgtttctgcaacggcctagctcctactagtaatcattccctatcagtatagtagaattaaccttattttagtattatcattattattttgagacagggtctcactttgtcacccaggctggagtacagtggcatgatcttggctcattgcagcctctgcctcctgggctcaagctgtcctcccgtctcaccacccggccccttcccctcaactagctgggactacagtcatgcgccaccaagcccggctaatttttgtatatttttgtggagacaggtttcaccatgttgcccaggctgatctcaaactactgaactcaagggatccacccaccttggcctcccaaattgctgggatggcagacctgagccaccacaccggcaaatttattctttataatggttgcgtggtacagaatttccattttataggtgtg

SEQ ID NO: 81 - DNA, 3640 bp, Homo Sapiens
aatttctagaaattaatttgttacaattttatgataccgtaacatctcttggaagagacatatgtggatgcttctatagcaagaccctgtgataagtaatttttatgtttgtatcaaaataatcagattgtcttgtgattggtctagtcacctagcccaatcttattatctcaggaggaaattaaacttcgttagtattaacatacttgtattaaaataagaacctatacaaacctattgatagaaggtaggaatttatgattgtgcactaaatccattcacataagaaatatttttctttttactggactctatgagactgacattttttatgtagaaataatgtggctttcttctcccaaagatgcttatccatcttattcaaatagagacacaatgagagtattatttaataaatatttgttaaatgttttctccagcattataagaaatgcaccctctaacaaccacaacttcagtaacaccttccttctgttgctaccctaggttgggggccattcaattttaccaagagtgtggaaattctgctgttttaatggggactgaaaggaaactagtcatttctcattcaaaccatcaaggctcctagattgatttaaaatattaagtcggtgtttaaatattccaataaatggactttacaaagagcacaagcaatgtcacttgaggaacaaggcctcaagctgaggagcaggatattggagagcctccttcttaattacccacctttattagacttgaggattttctgtcttacaagaaaatcagaaataaattttattggtatgctctgtaagaacgatttcttctgataacttggggtagcagcatttgtttgattagctgaatttgccatgaatgtggaaataatgacatcaaaacagctcgtgtaacaacctccttaaagacctcgtagattagagatgactatagattttccccagcgcggatcaaagggactgaattgaacgttttagcttaatgatccaacccctgtcacacccacagggacgcgaattccgattttataagcaggtgtgcacgtgcactcagatactcacacaaagccgcgtggagggacgaaaagatcaaccacccgatcgacgaggataggtttgatcttttcgattacctcagtgtgccagtgtatattcccggctgggcctagcgccctaagaaacttcggaactttagctgttaatttttgttttcttactatgacttcccaaagacattctatctgcctaccggggcgaagagaaatgggaccaggcgtcagggcggtgggaccctgtccagggtcctgactccgcgccagggctccagaccagtcggcctccgaaggccctttcacccaccccacacaagaggaaacaaagacttctcagctcaaggcctcagggctgcctcctgactccggtcagtttgcaggaagaggaaacaacaaaacaaaggaaccgccaatccgccgggtattatatccctcagctccaacctccgacttcggaccgccagggtcaccttctctacgctgaccccgcttttcttaaatgaaaacacgccaacaaaagcatacttcggatacaaaatccaagtacgcatcttttttggggaggttagagctgaggtgtacttcggaagatgagaattttgttttcatgaattgggtaacacccaggcattgttaggtaccccgacagaccctctagatatccttctcttcctccttcacactttcttcctatcaaaatagttattgttttgaaattcactagaacaacgacgttctaaaaacaaaggcgcagcaagcatccctttcttcgctgccgcgggctgaaccacggacgctcgcgggtcgcccagccccgacggcccgcagggggcgcgcgccgcagccgcagcacagcccggctacccccagaaagggagccgaatggagggaagcagggagcgcggagggctcgaggcttgcagataaggagaggcgcatcctgggatttgggtcctctgctgctacaacacaaccgtgctattgttggcactgtccgacccaagtgtcggtggtaagcggcgatgtcggggctgggtctctagcaaccgctgtgccctgggtcaggctggtcgccccagctaccgggatccctctccggatgcttccagggcgataggtgctgcacccattgacgggatagccgcatacctccgaacaggtagtggagttcgtctctggcaggcatcctagctgcgctgacaccaaggtcgccacacaatagccatcagccccccttaagccccagaagtaggtttcccctgccccagccatagcggttccagtcgtcgccacgagcccacttcttatccccaagcgcacctccctctcctcacccgggtttatgcccgttacacagagagaactacacagggggaactatggtcctacaccctcgaggggacagacaccggccgtgagacaggcaccacgcagagccttctggtgactgtccgcaggagcgagaccttttttggttttgcagtcggctaggtgtgtgtgtgtgagggtccccagttgactaccgggatgcactgccacttttcggcctggcgggctctgggactccttggtctccgtaggaggccatcctaggccttcggaggaggcgctcccagctggcggcgcccctcgccccgggctcagaggcggacacggtcggtcgcgccctgctggccctttgttcgcgccgcagcgggctgggagcagctgcgcgacaccagacccacagcgccaagacgcgaagcgcgaggaaaccgctgcgcttgactccttctcccccaactcttggacccaggaacgcttccagctcctgcgtcccacacgcccagtcctggcttctctcccggcccagaagtcttcaaggattgaagggctctgcctagggccccgcactcctgcctgactcccatggcccagaaaagcagggggacatttgaaatgtcaccccgggataaatattaacaaaaaagcaaatggacttgtgcaggggccagttatcaatcaaccaggccgcaaggccactcagggcaaacacagcccaggttgggctgggcgagactttctcatggccgccccccgaccgaacccctccccccttggctcaggtccttcttaggtcgttctggggcaaacaccggacgggaagggggcgccgccaactcccccgcggggtttggaggtttcctcgcctccaagtcccgcagggcagggtcggagtgcccaacacccacccccgcccgaacctcgggcctgcgcgccgccttcccctgggtccgcggtgctgcgcttgctgttgggtgtgtgtcgctgtctctttccgagccggcagctcctgctgtgtggccgaagccctctggaatctttaattggaaactaatcttggtcttgatagacgcccacgtcagaggcgcgccacccacccacaccccccgcctcatcccggaggagacgcggcgagaaccctgtcgctctgctctttaatggggcagcagcaagtagtacatggagggaacatatattgatttttaaaaggtagttaatttggtgggaatttcctcctgtcgccct

SEQ ID NO: 82 - DNA, 3240 bp, Homo Sapiens
gaaactgaggcacaaggcagcaatgattactgagggtcctgcctccgctcctctaggtgaggagcctattccaggggctccagtctgaaagcctagaggcgaggggcgcgcactacaattcccagaggtccccggactcaagggcggtccccgccccccgccttctccgcgcgacgaagccgggcttaccaatgggagcccggagtggggcgagcaggggcgggacggggcgggactgcggggaggtggccggcgggccgcgccgcgagccagtatctcagagagcgcggggtccggacagccgcgcgctgagggtctcggggcgggcgccgcgggacctctccgggccatgggtaagcggctctgcggcgcggcccggacaggggctcggcggccctgcagggaggttcaaggtgccggcgccgggtcccctccagccctcgtggcagtcggtgcgctgtgtggggcggagaggggcccggggtgggtttcggggcgcgggccaaggggagcgagcccggcccgcggcttcagcgctccccggccggcgcggaaggggtgaggctgggcgtccgcgcgagcttcgagaaaaggaaagacaaaaagttttggcggccaggggcttcccgggcgtttatctcgaaactcttttcgccgtctcttgcctgaaatatgccgagcccggtacggctctgtcgtcccacttcctgctgcggtttccacctcgagctgggctcagctaatttgttgtgacagctgtcggcagccgcccctccgccccgtgacatcccgcaggtttcagaaccgcggcgccgccgggcacagactccgggtccagagcgcgcggccctttcctctgcggccgccgtttcctgaaaggggctgcgcgggtgtgaagaacttgctcaatgcgctttgtaggatccactgttcctctttcggccgcgggctgcgccgatggtccggggagcccggcttctcgccccctgccccttccttctcttcccttttctcttttcctctcctgtctctccgcccacccgccgcagccccacaggagaggggtcgcttccctggttgctctcctctcctgtcccttgtgtgtccccttgtcttccctcggtctgcagaagggacggggtggcggctggggagcgtcaggggaagagggcaagagcgtgggctacgagcttgcaggcgatgcccggcttcgcgctcggcgggagctgcgggccaacccgggcccgcgctccgtccctccgcggtgtctaggggtcgcccgggctggggtcgcgtcaccctccgcccagcgccggcgtggtggggcttgcgcggtgcaggacccccgagggcccagggggtcccaaggcgctgcgggtccagtgtccctttgtttgcagagtcttgggccagtaaggagtgctccgcgggccccaggggaggacaacaggtgcctcttgccccacccgggctcctctggtgggagcccacacgcacggtggcgtcactgcgcctacaggcaacgctagagcacaggaggggtgggaggtcggggctcgagggcttcaccccgcagcagagctcagagcccaatccaggccttagggacccgcctggggcctagaacttggtgtggcagaggtagaaagggcctccgataatctgcttctacagttgagagacgtcaactggcacctctgagcctctgccccgtaggtgaaatgggaacacacgaaaccatctgaggagctctcactgtccgtcaccaccaaatgtggcccagactccgtggggagggacagtcccatcctggaactggggcttttaggacatcccagagcccggtaagagggacagggagaatggggcttggaagttggtagcctcacattcagtgtcccccgcacctccttccctttctgtaccctctggtggctcttgtggcctcagctgcccccagaccctgtctctctcgccctcccccaagctgaggtactgaggttgggctgtggcttgagctgcacctgtgccctgttagggagtgggggtcccaggcccatcgcgtttcttctcactgctggctccagctcaacacttggcaggcccccctccccaaactgctggagcaagctcgcgtagactcggcctggccgccgctcccgggctgccgagtggaccggccgtttcgccgcttcaaaggctgtctttgttttgctccagctcaagcttagagaaacttaagccaacaacctcagccgagggggcggggcggcgtctgctggttgttattgaggctgctgttaccattattgtggtaattgacgcagtgttcccagtcggtgacttttcatgaaaggaagtgtcacttccttcccatcacacccagggtgagtggggcgggcagcagaaagatggggagggagagaaggaaaggggtgtgtgcctccagcagacccttaaacttgagagctgtgtggccttgtactagtcactgcccctctctgggcaacaggggtctgtaagtccattgcgctcatcctgcacccaggaggctgatgtttccggagcacctgctgggcagcgaggtgccttggggagggagcaggacaggcaggcctctgatcttctcactgagcctggctgtggtttgtgggggaagcctcctttctcttctcacttttttctgctgagaacattgggcacattgagtctagcacgcccatcttgtagatggggaaagggagatacagaaccagtgaccaacttggtaagaggtgcagccatgcagtgctggaaccccttgccccatctgtcctcttggcccactttcatctgcttccagcttgatgtctggcagggcaggggcccactgacttccccgcatccacccactgcctggccccatagctaccttctagtcctggctaagccccgtgagacatcttaagtttgtcttcagtgactctcaaccaccgcccgactgccttcaccttcctgcctttgcatacctgcctttgcttcgccaggttggttgggccctggccagagctggccccctactctctcaggtaacaggtagcagttttttaaatggaatctcagtaggtatcaacaggtctttcctccttcctcaagattatggagataacaccccttattcaaagatggtgggtcctctgggccctccccgacccaggccagggaagttgattcatagagtgtgggggccatgccccttcc

SEQ ID NO: 83 - DNA, 2155 bp, Homo Sapiens
tctcccttccttctcacccctggagggtcccagccaccagccttgaagctgcagcgagagccacccactgccttggcctttgggaccccttgagcaggagaaaaaaaccagaaaaccaaaagagagagagagacctggaaggaagaagtaatggaggagggagacagggggaacgagaggggagcccacaccacagagagagaactccttaaaggaagcgcaggcgtttacgggacaggagcgcggaagaaaagagtagaaaaggaaaagcagtttcaagcaagagaaagtaaggagaggcggacagggaggggaagagccaagagaagccaagctgagggatctgcagcaactttgagaaataaaagtgaactgtctgtgggcggctgctgtgatctcagcaaaaagcggagctcaaggctcagggactccgccgcccacactgtgccccgccttattttggatgcctccaacttcagcttcaggcacagtacacgagtaggggcagtaaggcctggctagggccggtgccgcacgggagctgcgggtccctgcaacacccaggtgtgcaggcgctacaagaaggagccggggccgctgcccccgcagcgcggacttcgccccgtgctgcacacgctttagaagagcgtgtccggaagtgtcctccccggccctcctcgcttcccaagatttgtttgcaacgtctacacccgtcaccaccgcataagcaccagggtgaggaggtctctttgcaggaattaatatcgatttcagtctcctgctccttcaaagtttctctttgacgatggcgagacttatattctaagtcagaagaaaataaaaccttgcctattctgggcccatgattgcacaaaatccaaaatgctgccggcatgaagatgcagctggaagactctagaaacctagcattaggaggcagagactttatagtgcccagagatgagttcctaaataaactaagaattacgcagtgggaaattaaggaggagggtctgaggggccgacctcagagggacagatagagaaatcgagagcgaaacactcaaggaagtggaacaaatcgtcgtagccaggcgtctctgcctctccggaaacccgaaatccgcccaaacctcatcccaggcgctcacggtaccagtcgcagggccccgcactataggggctgccaccctctgcccccggagtccccacgccgagactcatcatttgctggctctttcttccttttcttcttttgtttttttatccttcaaatataagacaaaaatacacctcatttatcatcatagatatatatatttcactctcaccacataaatacaaaacatccaaatatccaaaacattcagaacaaagttagtagcctggattcagtgacacctacccgcgtttgaatcgttcattattttcttcactatttgcctagaaaaaaaaaaaagatgaaaaagagggggagagtttccgacgtaaataatttacaataaaattactattttaaaaaagtgtttttcgcttgcttcagatggatgaatacattctagacactgcggcacctcgcagtctgggtctgtgattttggttaaaatgtgggtggccgtggctgtagggacgatcgccgctgcgcagggtaaggaaagagggtgtcgcggttcgtgttctgatttgggaccactgaaaccctaagactggggaggcgaggggagtgtctttcctatcaatcacacaagacgctatctggactccgagactactgctagaggaggcccgaccacccagcggcgtccctgcctccccttccgcaaagaactgctcagaaatccagacgtttcctgcgtgcaggaagggttttgtgaatccgggtgtttgggagaggaggcaatgagtgctgactcgttttccaaaccgagcaattgtgcccgaagctacgcgcctgggaggccgtagggtgaagcgccggctgcgcaggctaccgccggcagccgctttgctctttcctggaggagtgggaagctgtcggccaccgccccgaacaggctcggagaaaagattctgaatttcctttgattagcggcgttaccttttcctttgcttttcccccattaaattcctgtttaaagttacaacacccagaacc

SEQ ID NO: 84 - DNA, 4513 bp, Artificial Sequence
  chemically treated genomic DNA (Homo sapiens)
agtgtatggggaaagattaatttaattgtttatttgtggttgggatagtttagggggtgtgtttacggttgatttaggggtgtgtatacggttgagttgggagtttcgttggtttttttgaggattgagggtgaatttcgttttttgttttaaatttttttattttattgtagtaatagttttacgttgtatataatagtgtaaatttttttaaaaaggaaagtataaaaataaaagttgtaatttaaaagtttgaataattatttgttgtttaggaaatttaatgaaatgatatgtttttttagtaggaagtaaagttggtttttgttttttgttttttttgttgttttagtttataaaatatgtgtattttatagttttagtattaaatatttataattttatgagaaatgaatgaatgtttttatttataattgtgtttattaaaattgtgaatatttttattttcgtatttttgtgtgttgaaatttttgaaggttatattaaataaaataaaatttttttattataaaatattgaaggttttaggtggaatgatgagttttttaagtatgtttgagtttagaggaattgtttgggtattttttttagtatttaggtgtttatggttttcgtttcgtttgggagtaggtgttaggtgtttttgtagcgagaggtgattattatttttttttaaataagatagtttggatatgttatatgtgagtatagaataattaaaagaagtatatattttgttattaggaggaagtgtttaaaattacggtgttattttagtgattatatttttttaaattttgcgaagtttaataggttttttttcggttgggtgtttattggttttgttattcgtgttggatcgaggcgtttttttttggggataggaattttttattttattgagataaagagatttttttttttaaagtgttatttttgtttattttttgttgttttttttttaaaataaaagattttgtataattttttaagtaggattgggggagggattagtttcgtttgtgttgatcgcgtttttggatttcgtttattaggaagtgtttggggtttttgagcgagtgatttacgcgttgaattgttgtttttttaaatttttatggtttaaaaatttttttttttttttttgtaaaagaaatttagagattggtgatttgttatcgaagacgattttttaggcgttttttgtttttttaggtagttgggtcgttggcgtttttaggcggaagcggggtttttgggttgggtttttgttttgttaggaagcggtttgggggttgtttttcgggatttttagaattttggaaggagagagttggggttttatcgcggagattttcgagttttcgttgtttgggttcgagttgcgttttagggttatcgttgatggcgcgagattacgtatttttcgcgaatttcgatttttgaatagtttagaaagttcgtagattaaaaattaaataaaaaatattggtataatttttattgtcgtattggttttttttttattttaataaaaatacggtaatatgaagcgattatttttttaaaaatttgtttttaaagtataatattgaaaaggggtaaggtatagttttgtaaggtaatgagtttttcgtttttagaggtgtttaagtagacgttaggtttatagtggtatggagagtgttttttttttttggaattggatgagtttttagatttttgaaacgttgagtttttttttttttttttatttttatgtttattatattttaatttaatagtatataatttaagttgtttttttatggagagtcgcggttgtgttatttgtttgttttcgttatggagatcggagttaggtttgtagggaagtcggtgcgttttttttaagttttttgttcgttggtttttttcgggtttttcgggttttgcgtgtcgcggatttggattcggattgtagatatcgttttacgattgggttttcggttagattgttattttataggaggagggttttttaagtgtgtagaagaggaaagtttatttataaagtttttgttttttcgagttgaacgattttcgcgttcgaggtttagttgtgttttcgtcgggtttaggttgagtttattttatattgttttatagtcgggtagagatttcgcgagggtttgggagttttggtttcggaggattcgtcgttttgtaggtttgtttaagtaggcgttttcgcgagagtgcgggatagagagggtttggcggggttttttggcgttgagagtttttttttttcgttgtatttagttttgttaacggggttggatgagtgggggttggagttagaattttagggtttatattcgtcgatagtagtaatgtcgattcgttttgttttttttttaaggagcggagggaaggagttatgtgaatgattttagtttgattattaagagggcgttagtatttttgtttttttagagtgaaaaggttaaatcgatgggggtttttatatcgttggatataggtgcgttcgggcgtttagtgcgcgtaatatacgtttagatattttatatgtaaatatgtttgtcgtcgcggagtcggtcgggaggtagcgtttgttcgttggggttttgttagaagttattttgtttttcgttggtttaatattcgttttttgcggttttcgttcgtttcggcggttttcgaagcgttttcgggagggtttcggtttcgtcgaaaattgtagtttgttaggttgagtcgtcgcgcgttgggaggttaatagcgattgacgataaagggttaaggtgtaatttttaaagcggggattcgtcgggtgaggtagaaattagttttcggggagatgggtttttttttttcgacgcgtttttgtatatattgttgtttcggcgtcgggttttcgggcggggatttttttttcgggtatcgcggttttattcggcggagagttaggttttttttaggtttttaagtagggagcggacgtgggtggtggggaagggaagtcgtcggcgggacggagagtggggtttttcggattttgggtcgggtaggtttggcgttggtagttttgttgtatagatttgtgagcgatgttggtggtcgtattgtcgcgcggcgcgaattttaagtagattatttatgtttttattaataattttaaatattttattatatttatgttgtttgtttagagaaaataaaaggttatttttgaaatcgtttgaaatgtaataatatttattaaagcgttttttaattatgtgatttaattaagcgtggtgcgttcgcgttttcggttttcgttggaaaggttggcgatgacggttattattattgttgttgttagtggtttcgtgatagtagtcggttagttttttagtttaggtttagtttttttagagagattcggggagttttattttgagggatggggtttttcggaacgatttcgaagtttcggagattaggcgcggtttaggttttttgtttttttttagttttagttttagttttagttttagtttcgggtaaatttttttaggtcgagggtaggattttttttagatttttggggttttttgtgttttttggggacgttcgattcggttttttaggagggggaatttcgggttttgagttcgggtttcgtttcgttggttgtttcgttttttttagggttgagtttcgcgtaatgttcgaagtagaaataaagagtcgtcgagatttgttttttgggtcgtttttttatttttttagtttggaaggcgttttagagaggttttatttttagtttttacggagatttaggagggaagaagagtcgggattcggtagttttgaggggttgtcgggtttgcggcgtttttttcgtcgtagaggggttgggtgggagacgtaggcgggaaggattttgttttagtcgagagttttttgtggggtcgaggaatggtgaggattattgtttgtattaatcgtttggaagaaatcgggcggttagtcgttcgattttatttgtcgagatgtgaaatttggtcgcgcggttcgggcgcgcgttgtttgcgcggaaggagtcgtttttttttttttagcgaacgtattcggggtttttttttttcgttaagttttttgtttggaaggggattggtaggttttgtcgtcgtcgtgtgttttttttttttttttagtttttattttttttaattaatttttttttttttttttttttttttttttttttttggatgggtaattataggtttcgttgttaagcgcgttgcgaggagtcgttgttcgttttcgtcggtgttttttttcgcggtagtttggtcgagttcgtttagtttgtttaggacgtttttgattcgcgcgtttagttttatttagtggtcgtgggatgttgtatttgagttttttttttaggttaaaattttgtttcgaggtttttttgagagggttttattttttaata

SEQ ID NO: 85 - DNA, 4513 bp, Artificial Sequence
  chemically treated genomic DNA (Homo sapiens)
tgttggagaataaaatttttttagaaaaatttcgggataaagttttggtttaaaggaaaaatttagatgtaatattttacggttattgaatgaaattgagcgcgcgggttagggacgttttaggtaggttgggcggattcggttaggttgtcgcggggaggggtatcgacgggaacgggtagcggtttttcgtagcgcgtttggtagcggagtttgtgattatttatttagagagggaagaaaagagaagggaagaaaggaaagttagttggagggggtagaggttggggaaaggaggggggtatacggcgacgatagagtttgttagtttttttttagataaaggatttggcgggaggggggaatttcgaatgcgttcgttgaaaggagggaggcggtttttttcgcgtaggtagcgcgcgttcggatcgcgcggttaagttttatatttcgatagatggggtcgagcggttggtcgttcggttttttttagacggttggtgtaaatagtgatttttattatttttcgattttatagaggattttcggttgggatagggtttttttcgtttgcgttttttatttaatttttttgcggcggagaaagcgtcgtaggttcggtagttttttagggttatcgggtttcggtttttttttttttttgggttttcgtggaggttgggggtggggtttttttgggacgttttttaggttgagggggtgaaaaggcggtttaggaggtagatttcggcgattttttgtttttgtttcgggtattgcgcggggtttagttttggagggggcggaatagttaacggggcggggttcgggtttaggattcggagtttttttttttagaaagtcgggtcgggcgtttttaggggatatagagggttttaagggtttggagaaagttttgttttcggtttggaagagtttgttcggggttggggttggggttggggttggggttggagaagggtagagggtttgggtcgcgtttggttttcgggatttcggagtcgtttcggggaattttattttttaaagtggggtttttcgagtttttttgaggaaattgggtttggattgaagagttggtcggttgttattacgaggttattaataatagtagtaataataatcgttatcgttagtttttttagcgagagtcgagagcgcgggcgtattacgtttgattaaattatataattaggaggcgttttaatgaatattattatattttaggcgattttaagaatggttttttattttttttgggtaggtagtataaatataatgaagtgtttgagattattaataaaaatatgaatggtttatttggggttcgcgtcgcgcggtaatgcggttattagtatcgtttataaatttgtgtaatagagttgttagcgttaggtttgttcgatttagggttcgggggattttatttttcgtttcgtcggcggttttttttttttattatttacgttcgttttttatttggaggtttggagagggtttagtttttcgtcgaatggggtcgcgatgttcggaagaggggttttcgttcggaggttcggcgtcggggtagtagtgtgtgtaggggcgcgtcgggaaggggggatttattttttcggaggttgatttttgttttattcggcgaattttcgttttaggaattgtattttggttttttgtcgttagtcgttattaattttttagcgcgcggcggtttagtttggtaggttgtagttttcggcggagtcgggattttttcgggggcgtttcgggagtcgtcgaggcgagcggagatcgtagagggcggatattaaattagcgggagatagaatgatttttagtagaattttagcgaataaacgttgtttttcggtcggtttcgcggcggtaggtatatttgtatatagagtgtttgggcgtgtgttgcgcgtattggacgttcgggcgtatttgtgtttagcggtgtaggagtttttatcgatttgatttttttattttaggaaaatagaaatgttggcgtttttttggtggttaggttggggttatttatatggtttttttttttcgttttttaggagaaaggtagggcgggtcggtattgttgttgtcggcgggtgtagattttgggattttgattttagtttttatttatttagtttcgttggtagagttgggtgtagcggagaaggagggtttttagcgttaaggagtttcgttaggttttttttgtttcgtattttcgcgggggcgtttgtttgggtaggtttgtagggcggcgggtttttcgaggttaggatttttagattttcgcggagtttttgttcggttatggagtagtgtggagtaagtttagtttgggttcggcggggatatagttaggtttcgggcgcgggggtcgtttagttcgaaggagtaaggattttataaatgagttttttttttttgtatatttagggaattttttttttgtggggtaatagtttggtcgggggtttagtcgtggggcggtgtttgtagttcgggtttagattcgcggtacgtagagttcgggaggttcgagaggaattagcgggtagaggatttgggaaaggcgtatcgatttttttgtaggtttgatttcggtttttatggcgaaagtaggtaggtggtatagtcgcggttttttatgagggagtagtttagattatatgttgttggattaaaatgtaataaatataggagtaaaaaaaaaaaaaaaaatttagcgttttaagggtttgaggatttatttagttttaaagagaaagaatattttttatgttattgtaagtttagcgtttgtttgaatatttttgaggacggggaatttattattttataaagttgtgttttgtttttttttagtgttatattttgaaaatagatttttaaaaaaatgatcgttttatgttatcgtatttttattaaaataagagagaggttaatacggtaatagaagttgtgttagtattttttgtttggtttttaatttacgaattttttgaattgtttagaagtcggggttcgcggggaatgcgtggtttcgcgttattagcgatgattttggggcgtagttcgggtttaggtaacgagaattcgggagttttcgcggtgagattttagttttttttttttagggttttgaaaatttcgaggggtagtttttagatcgttttttggtagggtagaggtttagtttagaggtttcgttttcgtttgggaacgttaacggtttagttgtttggggaaatagaaaacgtttaaaaagtcgttttcggtaatagattattagtttttgagttttttttatagggagaagaaaaaaaatttttaagttatgaaagtttggaaaaatagtaatttaacgcgtagattattcgtttaaagattttaaatattttttgatgagcggaatttagaggcgcggttagtataggcgaagttgattttttttttaattttgtttaggaagttgtataaagttttttgttttgggggggaaataataaaaggtaaataaaaatgatattttgaaaaggagagtttttttgttttagtggagtaaaaagtttttgtttttaggggaaagcgtttcggtttagtacgggtggtagggttagtgagtatttagtcggagggagatttgttgaatttcgtaaaatttaaaaaaatgtagttattggaatagtatcgtagttttgaatatttttttttggtaataaaatgtgtattttttttggttattttgtgtttatatgtgatatatttaaattgttttatttaaaaaaaaataataattatttttcgttataaaggtatttggtatttgtttttaggcggggcgaaggttatgagtatttgagtattggggaggatgtttaggtagtttttttggatttagatatgtttagaaaatttattattttatttgggatttttagtattttataataaagagattttgttttatttaatgtaatttttaagaattttaatatataaaaatgcgggggtgggggtgtttataattttgataagtatagttgtaaatagaaatatttatttattttttataagattataaatatttgatattggaattgtaaaatgtatatgttttataaattaaaataataaagaaaataaaaaatagaaattaattttgttttttgttaaaaaggtatgttattttattgagttttttaagtagtagatggttatttagatttttaaattataatttttgtttttatatttttttttttaaaaaggtttatattattatgtataacgtaaaattattattgtaatgaaataaagaggtttaaggtaaagagcgaagtttatttttagtttttagggagattagcgggatttttagtttagtcgtgtgtatatttttgggttagtcgtgggtatattttttgggttgttttagttatagatggatagttggattggtttttttttatatatt

SEQ ID NO: 86 - DNA, 2280 bp, Artificial Sequence
  chemically treated genomic DNA (Homo sapiens)
tagtggcgagtattcgtcgttggttttttagggtaggtagtattgtcgttttaggcgtgcggagtcggggagaaaaaaatcgaatacgtgtgttatttagggtttttagataagttttttcgcgcgtatatatattttgaatcggagtttagaaggtcggattcgcgtttcggggtcgagttttttatttttcgtttttagttcggaagattttagtttgttcgaaggcggcgtttgattcgttggtggatttggtgggtgtttgtttttgatatttggggacgaggcgggagcgttttgagcgttgggaagtttcgtttcgcgagttttcggtagtgatacgtgggagcgttgggttcggtattttcgacgttttcgaggtttcgggtggtcgttttgttttttcgggggtttttattttttaagtggttttaaacgatcgaggatgggtttttcgcgtcgtcgtagttgttatttttttcgggaaaggttagcgattttggacgcgtaggttttgaaaattaaggtttagatttatatcgagcgtttaaagatcgtatttgaatttttttcgtcggttattgagggagagaaaggaacgtttagttttatttatatttatagaaagaagcgtcgagggtgggggaaacgtagttttgtcgggtgagtcgggataggtttttcgtttgtttttcggtcgttgtttttttttagttgaatggggagcgattcgtttcgggcgcggttttcggggttgaagattgaggtgtagttttattttcggtttggtagcggtttggaagagagagggaaaggaggaatatttattcggttaagagacgtcgttagagtttttaaagttggcgggggacggaggtcggggtttcggatttttagagcgttcgtagtcgggtttttgggtttttcggtgcggggaatttgattttgtagttttcgttagggcgcggcggggttgtaagaagggaggaaggagtgggattagagttttcgagggcgcgggcggcgtgtatttagttttgttttttcgcgcgttttgtcgtttgtttgttttttttgttgtatcgggtggttttggttttcgcgttcgttcgttttcgacgttttcgcgtggtttcgcgttgttcgcggttagtttcgtttcgtttcgtaaggagcgtgttgtttttttaatcgaaatgggattaagattttagggttttttcgtttttttgttttgaggtgataggattttagttaatagatcgaaaacgtgaaaagtattcgtcgttttttgttttaagtgtttttgtggaaggattatttatttggaaaagtagaataaattttgttgtcgtttttttttcggaggcgtgtttattttagagtttttagatttattggtattcgttatatttttttttgggttttataggtaggattttaagaatgatatgggggtatttgggtgatttgtgggttgtaggtttttaagaggtcgttttttcgtgtacggaagtgtcgtagttttattttagcggaagtaatattaaattttattttagaggtttgttttgtaaagaatttagagtttattatatttgatattattttaaaataatatttgtttgttttaagaagttgggagaaatcgataaaagaaaagttgaaatttatgttttttatttttattttaggagataattttgattaatagtttggtttgttttttatttttattttttaaaaataaataaataaataaataaattaaaatttattatatttttagattgtgtaggattacgtaggattttgtaaaaataaaaatgggattatattttattcgtttttgtaacggtttagtttttattagtaattattttttattagtatagtagaattaattttattttagtattattattattattttgagatagggttttattttgttatttaggttggagtatagtggtatgattttggtttattgtagtttttgttttttgggtttaagttgttttttcgttttattattcggttttttttttttaattagttgggattatagttatgcgttattaagttcggttaatttttgtatatttttgtggagataggttttattatgttgtttaggttgattttaaattattgaatttaagggatttatttattttggttttttaaattgttgggatggtagatttgagttattatatcggtaaatttattttttataatggttgcgtggtatagaatttttattttataggtgtg

SEQ ID NO: 87 - DNA, 2280 bp, Artificial Sequence
  chemically treated genomic DNA (Homo sapiens)
tatatttataaaatggaaattttgtattacgtaattattataaagaataaatttgtcggtgtggtggtttaggtttgttattttagtaatttgggaggttaaggtgggtggattttttgagtttagtagtttgagattagtttgggtaatatggtgaaatttgtttttataaaaatatataaaaattagtcgggtttggtggcgtatgattgtagttttagttagttgaggggaaggggtcgggtggtgagacgggaggatagtttgagtttaggaggtagaggttgtaatgagttaagattatgttattgtattttagtttgggtgataaagtgagattttgttttaaaataataatgataatattaaaataaggttaattttattatattgatagggaatgattattagtaggagttaggtcgttgtagaaacgagtgaagtataattttatttttatttttataaaattttacgtaattttatataatttaaaagtatagtgggttttggtttgtttgtttgtttgtttgtttttaaggaatgggggtagggagtaaattaaattgttgattaggattattttttagagtagaaatgggaagtatggattttaattttttttttatcgattttttttaattttttaaaataagtaagtgttattttaaaatagtgttaaatatagtaaattttggattttttgtaaaataaatttttaagataaggtttgatattgttttcgttaaaataaagttacgatattttcgtgtacgaaaaaacggttttttgaggatttgtaatttatagattatttaggtgtttttatattatttttgaaattttatttgtaaagtttaggaggaagtatagcgaatgttagtgggtttaggagttttggggtgagtacgttttcggaaggaaaacggtaatagaatttattttgtttttttaagtaaatgatttttttatagaggtatttgggataagaggcgacgggtattttttacgttttcgatttattggttaagattttattattttaaaataaggagacgaggaaattttgggattttgattttatttcgattgagaaaataatacgttttttgcgaagcgaaacggggttggtcgcgggtagcgcggaattacgcgaaggcgtcgggggcgggcgggcgcggggattagggttattcggtgtagtaaagggggtaagtaggcggtagggcgcgcggggagataaggttgagtgtacgtcgttcgcgttttcgaaggttttagttttatttttttttttttttttgtagtttcgtcgcgttttggcgaaggttatagggttaggtttttcgtatcgaggagtttagaagttcggttgcgggcgttttgaagattcgggatttcggttttcgtttttcgttagttttagggattttggcggcgttttttagtcgggtagatgtttttttttttttttttttttttaagtcgttgttaggtcgggggtgaggttgtattttagtttttagtttcgaaggtcgcgttcggggcgggtcgttttttatttagttaagaggaagtagcggtcggggggtaggcgaggaatttgtttcggtttattcggtaagattgcgttttttttattttcggcgtttttttttgtgaatgtgaatggaattaagcgttttttttttttttttaatggtcggcgaggagaatttaaatgcggtttttgggcgttcggtatgggtttggattttggtttttagagtttgcgcgtttaaggtcgttagtttttttcgaaggaagtgatagttgcggcggcgcgggaggtttattttcggtcgtttaaagttatttaaggaataaaagttttcgagagagtaaaacgattattcgaaatttcggaagcgtcgggggtgtcgggtttaacgtttttacgtgttattgtcggggattcgcgaggcgaagttttttagcgtttaaggcgttttcgtttcgtttttaggtattaggaatagatatttattaggtttattagcgggttagacgtcgttttcgggtaggttgggatttttcgaattgggagcggagagtaaggggttcgatttcgggacgcgagttcggttttttggatttcggtttagggtgtgtgtgcgcgcggaggggtttatttgggggttttgggtagtatacgtgttcggttttttttttttcgatttcgtacgtttggagcggtaatattgtttgttttagaaggttagcggcgagtgttcgttatta

SEQ ID NO: 88 - DNA, 3640 bp, Artificial Sequence
  chemically treated genomic DNA (Homo sapiens)
aatttttagaaattaatttgttataattttatgatatcgtaatattttttggaagagatatatgtggatgtttttatagtaagattttgtgataagtaatttttatgtttgtattaaaataattagattgttttgtgattggtttagttatttagtttaattttattattttaggaggaaattaaatttcgttagtattaatatatttgtattaaaataagaatttatataaatttattgatagaaggtaggaatttatgattgtgtattaaatttatttatataagaaatatttttttttttattggattttatgagattgatattttttatgtagaaataatgtggttttttttttttaaagatgtttatttattttatttaaatagagatataatgagagtattatttaataaatatttgttaaatgttttttttagtattataagaaatgtattttttaataattataattttagtaatattttttttttgttgttattttaggttgggggttatttaattttattaagagtgtggaaattttgttgttttaatggggattgaaaggaaattagttattttttatttaaattattaaggtttttagattgatttaaaatattaagtcggtgtttaaatattttaataaatggattttataaagagtataagtaatgttatttgaggaataaggttttaagttgaggagtaggatattggagagttttttttttaattatttatttttattagatttgaggattttttgttttataagaaaattagaaataaattttattggtatgttttgtaagaacgattttttttgataatttggggtagtagtatttgtttgattagttgaatttgttatgaatgtggaaataatgatattaaaatagttcgtgtaataatttttttaaagatttcgtagattagagatgattatagattttttttagcgcggattaaagggattgaattgaacgttttagtttaatgatttaatttttgttatatttatagggacgcgaatttcgattttataagtaggtgtgtacgtgtatttagatatttatataaagtcgcgtggagggacgaaaagattaattattcgatcgacgaggataggtttgattttttcgattattttagtgtgttagtgtatattttcggttgggtttagcgttttaagaaatttcggaattttagttgttaatttttgtttttttattatgattttttaaagatattttatttgtttatcggggcgaagagaaatgggattaggcgttagggcggtgggattttgtttagggttttgatttcgcgttagggttttagattagtcggttttcgaaggtttttttatttattttatataagaggaaataaagattttttagtttaaggttttagggttgttttttgatttcggttagtttgtaggaagaggaaataataaaataaaggaatcgttaattcgtcgggtattatattttttagttttaattttcgatttcggatcgttagggttattttttttacgttgatttcgttttttttaaatgaaaatacgttaataaaagtatatttcggatataaaatttaagtacgtattttttttggggaggttagagttgaggtgtatttcggaagatgagaattttgtttttatgaattgggtaatatttaggtattgttaggtatttcgatagattttttagatattttttttttttttttttatattttttttttattaaaatagttattgttttgaaatttattagaataacgacgttttaaaaataaaggcgtagtaagtattttttttttcgttgtcgcgggttgaattacggacgttcgcgggtcgtttagtttcgacggttcgtagggggcgcgcgtcgtagtcgtagtatagttcggttatttttagaaagggagtcgaatggagggaagtagggagcgcggagggttcgaggtttgtagataaggagaggcgtattttgggatttgggttttttgttgttataatataatcgtgttattgttggtattgttcgatttaagtgtcggtggtaagcggcgatgtcggggttgggtttttagtaatcgttgtgttttgggttaggttggtcgttttagttatcgggattttttttcggatgtttttagggcgataggtgttgtatttattgacgggatagtcgtatattttcgaataggtagtggagttcgtttttggtaggtattttagttgcgttgatattaaggtcgttatataatagttattagttttttttaagttttagaagtaggttttttttgttttagttatagcggttttagtcgtcgttacgagtttattttttatttttaagcgtatttttttttttttattcgggtttatgttcgttatatagagagaattatatagggggaattatggttttatattttcgaggggatagatatcggtcgtgagataggtattacgtagagttttttggtgattgttcgtaggagcgagattttttttggttttgtagtcggttaggtgtgtgtgtgtgagggtttttagttgattatcgggatgtattgttatttttcggtttggcgggttttgggattttttggttttcgtaggaggttattttaggttttcggaggaggcgtttttagttggcggcgtttttcgtttcgggtttagaggcggatacggtcggtcgcgttttgttggttttttgttcgcgtcgtagcgggttgggagtagttgcgcgatattagatttatagcgttaagacgcgaagcgcgaggaaatcgttgcgtttgatttttttttttttaatttttggatttaggaacgtttttagtttttgcgttttatacgtttagttttggtttttttttcggtttagaagtttttaaggattgaagggttttgtttagggtttcgtatttttgtttgatttttatggtttagaaaagtagggggatatttgaaatgttatttcgggataaatattaataaaaaagtaaatggatttgtgtaggggttagttattaattaattaggtcgtaaggttatttagggtaaatatagtttaggttgggttgggcgagatttttttatggtcgtttttcgatcgaatttttttttttttggtttaggttttttttaggtcgttttggggtaaatatcggacgggaagggggcgtcgttaattttttcgcggggtttggaggttttttcgtttttaagtttcgtagggtagggtcggagtgtttaatatttattttcgttcgaatttcgggtttgcgcgtcgtttttttttgggttcgcggtgttgcgtttgttgttgggtgtgtgtcgttgttttttttcgagtcggtagtttttgttgtgtggtcgaagttttttggaatttttaattggaaattaattttggttttgatagacgtttacgttagaggcgcgttatttatttatatttttcgttttatttcggaggagacgcggcgagaattttgtcgttttgttttttaatggggtagtagtaagtagtatatggagggaatatatattgatttttaaaaggtagttaatttggtgggaatttttttttgtcgtttt

SEQ ID NO: 89 - DNA, 3640 bp, Artificial Sequence
  chemically treated genomic DNA (Homo sapiens)
agggcgataggaggaaatttttattaaattaattattttttaaaaattaatatatgttttttttatgtattatttgttgttgttttattaaagagtagagcgatagggttttcgtcgcgtttttttcgggatgaggcggggggtgtgggtgggtggcgcgtttttgacgtgggcgtttattaagattaagattagtttttaattaaagattttagagggtttcggttatatagtaggagttgtcggttcggaaagagatagcgatatatatttaatagtaagcgtagtatcgcggatttaggggaaggcggcgcgtaggttcgaggttcgggcgggggtgggtgttgggtatttcgattttgttttgcgggatttggaggcgaggaaatttttaaatttcgcgggggagttggcggcgtttttttttcgttcggtgtttgttttagaacgatttaagaaggatttgagttaaggggggaggggttcggtcggggggcggttatgagaaagtttcgtttagtttaatttgggttgtgtttgttttgagtggttttgcggtttggttgattgataattggtttttgtataagtttatttgtttttttgttaatatttatttcggggtgatattttaaatgtttttttgtttttttgggttatgggagttaggtaggagtgcggggttttaggtagagttttttaatttttgaagatttttgggtcgggagagaagttaggattgggcgtgtgggacgtaggagttggaagcgtttttgggtttaagagttgggggagaaggagttaagcgtagcggttttttcgcgtttcgcgttttggcgttgtgggtttggtgtcgcgtagttgtttttagttcgttgcggcgcgaataaagggttagtagggcgcgatcgatcgtgttcgtttttgagttcggggcgaggggcgtcgttagttgggagcgtttttttcgaaggtttaggatggttttttacggagattaaggagttttagagttcgttaggtcgaaaagtggtagtgtatttcggtagttaattggggatttttatatatatatatttagtcgattgtaaaattaaaaaaggtttcgtttttgcggatagttattagaaggttttgcgtggtgtttgttttacggtcggtgtttgttttttcgagggtgtaggattatagttttttttgtgtagttttttttgtgtaacgggtataaattcgggtgaggagagggaggtgcgtttggggataagaagtgggttcgtggcgacgattggaatcgttatggttggggtaggggaaatttatttttggggtttaaggggggttgatggttattgtgtggcgattttggtgttagcgtagttaggatgtttgttagagacgaattttattatttgttcggaggtatgcggttatttcgttaatgggtgtagtatttatcgttttggaagtattcggagagggatttcggtagttggggcgattagtttgatttagggtatagcggttgttagagatttagtttcgatatcgtcgtttattatcgatatttgggtcggatagtgttaataatagtacggttgtgttgtagtagtagaggatttaaattttaggatgcgtttttttttatttgtaagtttcgagtttttcgcgttttttgtttttttttattcggttttttttttgggggtagtcgggttgtgttgcggttgcggcgcgcgttttttgcgggtcgtcggggttgggcgattcgcgagcgttcgtggtttagttcgcggtagcgaagaaagggatgtttgttgcgtttttgtttttagaacgtcgttgttttagtgaattttaaaataataattattttgataggaagaaagtgtgaaggaggaagagaaggatatttagagggtttgtcggggtatttaataatgtttgggtgttatttaatttatgaaaataaaatttttatttttcgaagtatattttagttttaatttttttaaaaaagatgcgtatttggattttgtattcgaagtatgtttttgttggcgtgtttttatttaagaaaagcggggttagcgtagagaaggtgattttggcggttcgaagtcggaggttggagttgagggatataatattcggcggattggcggtttttttgttttgttgttttttttttttgtaaattgatcggagttaggaggtagttttgaggttttgagttgagaagtttttgtttttttttgtgtggggtgggtgaaagggttttcggaggtcgattggtttggagttttggcgcggagttaggattttggatagggttttatcgttttgacgtttggttttattttttttcgtttcggtaggtagatagaatgtttttgggaagttatagtaagaaaataaaaattaatagttaaagtttcgaagttttttagggcgttaggtttagtcgggaatatatattggtatattgaggtaatcgaaaagattaaatttattttcgtcgatcgggtggttgattttttcgtttttttacgcggttttgtgtgagtatttgagtgtacgtgtatatttgtttataaaatcggaattcgcgtttttgtgggtgtgataggggttggattattaagttaaaacgtttaatttagtttttttgattcgcgttggggaaaatttatagttatttttaatttacgaggtttttaaggaggttgttatacgagttgttttgatgttattatttttatatttatggtaaatttagttaattaaataaatgttgttattttaagttattagaagaaatcgtttttatagagtatattaataaaatttatttttgatttttttgtaagatagaaaatttttaagtttaataaaggtgggtaattaagaaggaggttttttaatattttgttttttagtttgaggttttgttttttaagtgatattgtttgtgttttttgtaaagtttatttattggaatatttaaatatcgatttaatattttaaattaatttaggagttttgatggtttgaatgagaaatgattagtttttttttagtttttattaaaatagtagaatttttatatttttggtaaaattgaatggtttttaatttagggtagtaatagaaggaaggtgttattgaagttgtggttgttagagggtgtattttttataatgttggagaaaatatttaataaatatttattaaataatatttttattgtgtttttatttgaataagatggataagtatttttgggagaagaaagttatattatttttatataaaaaatgttagttttatagagtttagtaaaaagaaaaatattttttatgtgaatggatttagtgtataattataaatttttattttttattaataggtttgtataggtttttattttaatataagtatgttaatattaacgaagtttaatttttttttgagataataagattgggttaggtgattagattaattataagataatttgattattttgatataaatataaaaattatttattatagggttttgttatagaagtatttatatatgttttttttaagagatgttacggtattataaaattgtaataaattaatttttagaaatt

SEQ ID NO: 90 - DNA, 3240 bp, Artificial Sequence
  chemically treated genomic DNA (Homo sapiens)
gaaattgaggtataaggtagtaatgattattgagggttttgttttcgtttttttaggtgaggagtttattttaggggttttagtttgaaagtttagaggcgaggggcgcgtattataatttttagaggttttcggatttaagggcggttttcgtttttcgtttttttcgcgcgacgaagtcgggtttattaatgggagttcggagtggggcgagtaggggcgggacggggcgggattgcggggaggtggtcggcgggtcgcgtcgcgagttagtattttagagagcgcggggttcggatagtcgcgcgttgagggtttcggggcgggcgtcgcgggattttttcgggttatgggtaagcggttttgcggcgcggttcggataggggttcggcggttttgtagggaggtttaaggtgtcggcgtcgggttttttttagttttcgtggtagtcggtgcgttgtgtggggcggagaggggttcggggtgggtttcggggcgcgggttaaggggagcgagttcggttcgcggttttagcgtttttcggtcggcgcggaaggggtgaggttgggcgttcgcgcgagtttcgagaaaaggaaagataaaaagttttggcggttaggggtttttcgggcgtttatttcgaaatttttttcgtcgttttttgtttgaaatatgtcgagttcggtacggttttgtcgttttattttttgttgcggtttttatttcgagttgggtttagttaatttgttgtgatagttgtcggtagtcgttttttcgtttcgtgatatttcgtaggttttagaatcgcggcgtcgtcgggtatagatttcgggtttagagcgcgcggtttttttttttgcggtcgtcgttttttgaaaggggttgcgcgggtgtgaagaatttgtttaatgcgttttgtaggatttattgtttttttttcggtcgcgggttgcgtcgatggttcggggagttcggtttttcgttttttgtttttttttttttttttttttttttttttttttttttgttttttcgtttattcgtcgtagttttataggagaggggtcgtttttttggttgttttttttttttgttttttgtgtgtttttttgttttttttcggtttgtagaagggacggggtggcggttggggagcgttaggggaagagggtaagagcgtgggttacgagtttgtaggcgatgttcggtttcgcgttcggcgggagttgcgggttaattcgggttcgcgtttcgttttttcgcggtgtttaggggtcgttcgggttggggtcgcgttatttttcgtttagcgtcggcgtggtggggtttgcgcggtgtaggattttcgagggtttagggggttttaaggcgttgcgggtttagtgtttttttgtttgtagagttttgggttagtaaggagtgtttcgcgggttttaggggaggataataggtgttttttgttttattcgggtttttttggtgggagtttatacgtacggtggcgttattgcgtttataggtaacgttagagtataggaggggtgggaggtcggggttcgagggttttatttcgtagtagagtttagagtttaatttaggttttagggattcgtttggggtttagaatttggtgtggtagaggtagaaagggttttcgataatttgtttttatagttgagagacgttaattggtatttttgagtttttgtttcgtaggtgaaatgggaatatacgaaattatttgaggagtttttattgttcgttattattaaatgtggtttagatttcgtggggagggatagttttattttggaattggggtttttaggatattttagagttcggtaagagggatagggagaatggggtttggaagttggtagttttatatttagtgtttttcgtatttttttttttttttgtattttttggtggtttttgtggttttagttgtttttagattttgtttttttcgtttttttttaagttgaggtattgaggttgggttgtggtttgagttgtatttgtgttttgttagggagtgggggttttaggtttatcgcgtttttttttattgttggttttagtttaatatttggtaggtttttttttttaaattgttggagtaagttcgcgtagattcggtttggtcgtcgttttcgggttgtcgagtggatcggtcgtttcgtcgttttaaaggttgtttttgttttgttttagtttaagtttagagaaatttaagttaataattttagtcgagggggcggggcggcgtttgttggttgttattgaggttgttgttattattattgtggtaattgacgtagtgtttttagtcggtgattttttatgaaaggaagtgttattttttttttattatatttagggtgagtggggcgggtagtagaaagatggggagggagagaaggaaaggggtgtgtgtttttagtagatttttaaatttgagagttgtgtggttttgtattagttattgtttttttttgggtaataggggtttgtaagtttattgcgtttattttgtatttaggaggttgatgttttcggagtatttgttgggtagcgaggtgttttggggagggagtaggataggtaggtttttgatttttttattgagtttggttgtggtttgtgggggaagttttttttttttttttatttttttttgttgagaatattgggtatattgagtttagtacgtttattttgtagatggggaaagggagatatagaattagtgattaatttggtaagaggtgtagttatgtagtgttggaattttttgttttatttgtttttttggtttatttttatttgtttttagtttgatgtttggtagggtaggggtttattgattttttcgtatttatttattgtttggttttatagttattttttagttttggttaagtttcgtgagatattttaagtttgtttttagtgatttttaattatcgttcgattgtttttatttttttgtttttgtatatttgtttttgtttcgttaggttggttgggttttggttagagttggttttttatttttttaggtaataggtagtagttttttaaatggaattttagtaggtattaataggttttttttttttttttaagattatggagataatattttttatttaaagatggtgggttttttgggtttttttcgatttaggttagggaagttgatttatagagtgtgggggttatgtttttttt

SEQ ID NO: 91 - DNA, 3240 bp, Artificial Sequence
  chemically treated genomic DNA (Homo sapiens)
ggaaggggtatggtttttatattttatgaattaatttttttggtttgggtcggggagggtttagaggatttattatttttgaataaggggtgttatttttataattttgaggaaggaggaaagatttgttgatatttattgagattttatttaaaaaattgttatttgttatttgagagagtagggggttagttttggttagggtttaattaatttggcgaagtaaaggtaggtatgtaaaggtaggaaggtgaaggtagtcgggcggtggttgagagttattgaagataaatttaagatgttttacggggtttagttaggattagaaggtagttatggggttaggtagtgggtggatgcggggaagttagtgggtttttgttttgttagatattaagttggaagtagatgaaagtgggttaagaggatagatggggtaaggggttttagtattgtatggttgtattttttattaagttggttattggttttgtatttttttttttttatttataagatgggcgtgttagatttaatgtgtttaatgtttttagtagaaaaaagtgagaagagaaaggaggttttttttataaattatagttaggtttagtgagaagattagaggtttgtttgttttgttttttttttaaggtatttcgttgtttagtaggtgtttcggaaatattagttttttgggtgtaggatgagcgtaatggatttatagatttttgttgtttagagaggggtagtgattagtataaggttatatagtttttaagtttaagggtttgttggaggtatatatttttttttttttttttttttttatttttttgttgttcgttttatttattttgggtgtgatgggaaggaagtgatatttttttttatgaaaagttatcgattgggaatattgcgttaattattataataatggtaatagtagttttaataataattagtagacgtcgtttcgttttttcggttgaggttgttggtttaagtttttttaagtttgagttggagtaaaataaagatagtttttgaagcggcgaaacggtcggtttattcggtagttcgggagcggcggttaggtcgagtttacgcgagtttgttttagtagtttggggaggggggtttgttaagtgttgagttggagttagtagtgagaagaaacgcgatgggtttgggatttttattttttaatagggtataggtgtagtttaagttatagtttaattttagtattttagtttgggggagggcgagagagatagggtttgggggtagttgaggttataagagttattagagggtatagaaagggaaggaggtgcgggggatattgaatgtgaggttattaatttttaagttttattttttttgttttttttatcgggttttgggatgttttaaaagttttagttttaggatgggattgtttttttttacggagtttgggttatatttggtggtgacggatagtgagagttttttagatggtttcgtgtgtttttattttatttacggggtagaggtttagaggtgttagttgacgttttttaattgtagaagtagattatcggaggttttttttatttttgttatattaagttttaggttttaggcgggtttttaaggtttggattgggttttgagttttgttgcggggtgaagttttcgagtttcgattttttattttttttgtgttttagcgttgtttgtaggcgtagtgacgttatcgtgcgtgtgggtttttattagaggagttcgggtggggtaagaggtatttgttgtttttttttggggttcgcggagtattttttattggtttaagattttgtaaataaagggatattggattcgtagcgttttgggattttttgggttttcgggggttttgtatcgcgtaagttttattacgtcggcgttgggcggagggtgacgcgattttagttcgggcgatttttagatatcgcggagggacggagcgcgggttcgggttggttcgtagttttcgtcgagcgcgaagtcgggtatcgtttgtaagttcgtagtttacgtttttgttttttttttttgacgttttttagtcgttatttcgttttttttgtagatcgagggaagataaggggatatataagggataggagaggagagtaattagggaagcgattttttttttgtggggttgcggcgggtgggcggagagataggagaggaaaagagaaaagggaagagaaggaaggggtagggggcgagaagtcgggtttttcggattatcggcgtagttcgcggtcgaaagaggaatagtggattttataaagcgtattgagtaagttttttatattcgcgtagttttttttaggaaacggcggtcgtagaggaaagggtcgcgcgttttggattcggagtttgtgttcggcggcgtcgcggttttgaaatttgcgggatgttacggggcggaggggcggttgtcgatagttgttataataaattagttgagtttagttcgaggtggaaatcgtagtaggaagtgggacgatagagtcgtatcgggttcggtatattttaggtaagagacggcgaaaagagtttcgagataaacgttcgggaagtttttggtcgttaaaattttttgtttttttttttttcgaagttcgcgcggacgtttagttttatttttttcgcgtcggtcggggagcgttgaagtcgcgggtcgggttcgttttttttggttcgcgtttcgaaatttatttcgggttttttttcgttttatatagcgtatcgattgttacgagggttggaggggattcggcgtcggtattttgaatttttttgtagggtcgtcgagtttttgttcgggtcgcgtcgtagagtcgtttatttatggttcggagaggtttcgcggcgttcgtttcgagatttttagcgcgcggttgttcggatttcgcgttttttgagatattggttcgcggcgcggttcgtcggttattttttcgtagtttcgtttcgtttcgtttttgttcgttttatttcgggtttttattggtaagttcggtttcgtcgcgcggagaaggcggggggcggggatcgtttttgagttcggggatttttgggaattgtagtgcgcgtttttcgtttttaggtttttagattggagtttttggaataggttttttatttagaggagcggaggtaggatttttagtaattattgttgttttgtgttttagtttt

SEQ ID NO: 92 - DNA, 2155 bp, Artificial Sequence
  chemically treated genomic DNA (Homo sapiens)
tttttttttttttttatttttggagggttttagttattagttttgaagttgtagcgagagttatttattgttttggtttttgggattttttgagtaggagaaaaaaattagaaaattaaaagagagagagagatttggaaggaagaagtaatggaggagggagatagggggaacgagaggggagtttatattatagagagagaattttttaaaggaagcgtaggcgtttacgggataggagcgcggaagaaaagagtagaaaaggaaaagtagttttaagtaagagaaagtaaggagaggcggatagggaggggaagagttaagagaagttaagttgagggatttgtagtaattttgagaaataaaagtgaattgtttgtgggcggttgttgtgattttagtaaaaagcggagtttaaggtttagggatttcgtcgtttatattgtgtttcgttttattttggatgtttttaattttagttttaggtatagtatacgagtaggggtagtaaggtttggttagggtcggtgtcgtacgggagttgcgggtttttgtaatatttaggtgtgtaggcgttataagaaggagtcggggtcgttgttttcgtagcgcggatttcgtttcgtgttgtatacgttttagaagagcgtgttcggaagtgtttttttcggtttttttcgttttttaagatttgtttgtaacgtttatattcgttattatcgtataagtattagggtgaggaggtttttttgtaggaattaatatcgattttagttttttgtttttttaaagtttttttttgacgatggcgagatttatattttaagttagaagaaaataaaattttgtttattttgggtttatgattgtataaaatttaaaatgttgtcggtatgaagatgtagttggaagattttagaaatttagtattaggaggtagagattttatagtgtttagagatgagtttttaaataaattaagaattacgtagtgggaaattaaggaggagggtttgaggggtcgattttagagggatagatagagaaatcgagagcgaaatatttaaggaagtggaataaatcgtcgtagttaggcgtttttgttttttcggaaattcgaaattcgtttaaattttattttaggcgtttacggtattagtcgtagggtttcgtattataggggttgttattttttgttttcggagtttttacgtcgagatttattatttgttggtttttttttttttttttttttttgtttttttattttttaaatataagataaaaatatattttatttattattatagatatatatattttatttttattatataaatataaaatatttaaatatttaaaatatttagaataaagttagtagtttggatttagtgatatttattcgcgtttgaatcgtttattattttttttattatttgtttagaaaaaaaaaaaagatgaaaaagagggggagagttttcgacgtaaataatttataataaaattattattttaaaaaagtgtttttcgtttgttttagatggatgaatatattttagatattgcggtatttcgtagtttgggtttgtgattttggttaaaatgtgggtggtcgtggttgtagggacgatcgtcgttgcgtagggtaaggaaagagggtgtcgcggttcgtgttttgatttgggattattgaaattttaagattggggaggcgaggggagtgttttttttattaattatataagacgttatttggatttcgagattattgttagaggaggttcgattatttagcggcgtttttgttttttttttcgtaaagaattgtttagaaatttagacgttttttgcgtgtaggaagggttttgtgaattcgggtgtttgggagaggaggtaatgagtgttgattcgttttttaaatcgagtaattgtgttcgaagttacgcgtttgggaggtcgtagggtgaagcgtcggttgcgtaggttatcgtcggtagtcgttttgtttttttttggaggagtgggaagttgtcggttatcgtttcgaataggttcggagaaaagattttgaattttttttgattagcggcgttatttttttttttgttttttttttattaaatttttgtttaaagttataatatttagaatt

SEQ ID NO: 93 - DNA, 2155 bp, Artificial Sequence
  chemically treated genomic DNA (Homo sapiens)
ggttttgggtgttgtaattttaaataggaatttaatgggggaaaagtaaaggaaaaggtaacgtcgttaattaaaggaaatttagaatttttttttcgagtttgttcggggcggtggtcgatagttttttatttttttaggaaagagtaaagcggttgtcggcggtagtttgcgtagtcggcgttttattttacggttttttaggcgcgtagtttcgggtataattgttcggtttggaaaacgagttagtatttattgtttttttttttaaatattcggatttataaaattttttttgtacgtaggaaacgtttggatttttgagtagttttttgcggaaggggaggtagggacgtcgttgggtggtcgggttttttttagtagtagtttcggagtttagatagcgttttgtgtgattgataggaaagatatttttttcgtttttttagttttagggttttagtggttttaaattagaatacgaatcgcgatattttttttttttattttgcgtagcggcgatcgtttttatagttacggttatttatattttaattaaaattatagatttagattgcgaggtgtcgtagtgtttagaatgtatttatttatttgaagtaagcgaaaaatatttttttaaaatagtaattttattgtaaattatttacgtcggaaatttttttttttttttttattttttttttttttttaggtaaatagtgaagaaaataatgaacgatttaaacgcgggtaggtgttattgaatttaggttattaattttgttttgaatgttttggatatttggatgttttgtatttatgtggtgagagtgaaatatatatatttatgatgataaatgaggtgtatttttgttttatatttgaaggataaaaaaataaaagaagaaaaggaagaaagagttagtaaatgatgagtttcggcgtggggatttcgggggtagagggtggtagtttttatagtgcggggttttgcgattggtatcgtgagcgtttgggatgaggtttgggcggatttcgggttttcggagaggtagagacgtttggttacgacgatttgttttatttttttgagtgtttcgttttcgatttttttatttgtttttttgaggtcggttttttagatttttttttttaattttttattgcgtaatttttagtttatttaggaatttatttttgggtattataaagtttttgttttttaatgttaggtttttagagttttttagttgtatttttatgtcggtagtattttggattttgtgtaattatgggtttagaataggtaaggttttatttttttttgatttagaatataagtttcgttatcgttaaagagaaattttgaaggagtaggagattgaaatcgatattaatttttgtaaagagatttttttattttggtgtttatgcggtggtgacgggtgtagacgttgtaaataaattttgggaagcgaggagggtcggggaggatattttcggatacgtttttttaaagcgtgtgtagtacggggcgaagttcgcgttgcgggggtagcggtttcggtttttttttgtagcgtttgtatatttgggtgttgtagggattcgtagttttcgtgcggtatcggttttagttaggttttattgtttttattcgtgtattgtgtttgaagttgaagttggaggtatttaaaataaggcggggtatagtgtgggcggcggagtttttgagttttgagtttcgttttttgttgagattatagtagtcgtttatagatagtttatttttattttttaaagttgttgtagattttttagtttggttttttttggttttttttttttttgttcgtttttttttatttttttttgtttgaaattgtttttttttttttatttttttttttcgcgtttttgtttcgtaaacgtttgcgttttttttaaggagttttttttttgtggtgtgggtttttttttcgttttttttgttttttttttttattattttttttttttaggttttttttttttttttggttttttggttttttttttttgtttaaggggttttaaaggttaaggtagtgggtggttttcgttgtagttttaaggttggtggttgggattttttaggggtgagaaggaagggaga

SEQ ID NO: 94 - DNA, 4513 bp, Artificial Sequence
  chemically treated genomic DNA (Homo sapiens)
agtgtatggggaaagattaatttaattgtttatttgtggttgggatagtttagggggtgtgtttatggttgatttaggggtgtgtatatggttgagttgggagttttgttggtttttttgaggattgagggtgaattttgttttttgttttaaatttttttattttattgtagtaatagttttatgttgtatataatagtgtaaatttttttaaaaaggaaagtataaaaataaaagttgtaatttaaaagtttgaataattatttgttgtttaggaaatttaatgaaatgatatgtttttttagtaggaagtaaagttggtttttgttttttgttttttttgttgttttagtttataaaatatgtgtattttatagttttagtattaaatatttataattttatgagaaatgaatgaatgtttttatttataattgtgtttattaaaattgtgaatatttttatttttgtatttttgtgtgttgaaatttttgaaggttatattaaataaaataaaatttttttattataaaatattgaaggttttaggtggaatgatgagttttttaagtatgtttgagtttagaggaattgtttgggtattttttttagtatttaggtgtttatggtttttgttttgtttgggagtaggtgttaggtgtttttgtagtgagaggtgattattatttttttttaaataagatagtttggatatgttatatgtgagtatagaataattaaaagaagtatatattttgttattaggaggaagtgtttaaaattatggtgttattttagtgattatatttttttaaattttgtgaagtttaataggtttttttttggttgggtgtttattggttttgttatttgtgttggattgaggtgtttttttttggggataggaattttttattttattgagataaagagatttttttttttaaagtgttatttttgtttattttttgttgttttttttttaaaataaaagattttgtataattttttaagtaggattgggggagggattagttttgtttgtgttgattgtgtttttggattttgtttattaggaagtgtttggggtttttgagtgagtgatttatgtgttgaattgttgtttttttaaatttttatggtttaaaaatttttttttttttttttgtaaaagaaatttagagattggtgatttgttattgaagatgattttttaggtgttttttgtttttttaggtagttgggttgttggtgtttttaggtggaagtggggtttttgggttgggtttttgttttgttaggaagtggtttgggggttgttttttgggatttttagaattttggaaggagagagttggggttttattgtggagatttttgagtttttgttgtttgggtttgagttgtgttttagggttattgttgatggtgtgagattatgtattttttgtgaattttgatttttgaatagtttagaaagtttgtagattaaaaattaaataaaaaatattggtataatttttattgttgtattggttttttttttattttaataaaaatatggtaatatgaagtgattatttttttaaaaatttgtttttaaagtataatattgaaaaggggtaaggtatagttttgtaaggtaatgagttttttgtttttagaggtgtttaagtagatgttaggtttatagtggtatggagagtgttttttttttttggaattggatgagtttttagatttttgaaatgttgagtttttttttttttttttatttttatgtttattatattttaatttaatagtatataatttaagttgtttttttatggagagttgtggttgtgttatttgtttgtttttgttatggagattggagttaggtttgtagggaagttggtgtgttttttttaagttttttgtttgttggttttttttgggttttttgggttttgtgtgttgtggatttggatttggattgtagatattgttttatgattgggtttttggttagattgttattttataggaggagggttttttaagtgtgtagaagaggaaagtttatttataaagtttttgtttttttgagttgaatgatttttgtgtttgaggtttagttgtgtttttgttgggtttaggttgagtttattttatattgttttatagttgggtagagattttgtgagggtttgggagttttggttttggaggatttgttgttttgtaggtttgtttaagtaggtgtttttgtgagagtgtgggatagagagggtttggtggggttttttggtgttgagagttttttttttttgttgtatttagttttgttaatggggttggatgagtgggggttggagttagaattttagggtttatatttgttgatagtagtaatgttgatttgttttgttttttttttaaggagtggagggaaggagttatgtgaatgattttagtttgattattaagagggtgttagtatttttgtttttttagagtgaaaaggttaaattgatgggggtttttatattgttggatataggtgtgtttgggtgtttagtgtgtgtaatatatgtttagatattttatatgtaaatatgtttgttgttgtggagttggttgggaggtagtgtttgtttgttggggttttgttagaagttattttgttttttgttggtttaatatttgttttttgtggtttttgtttgttttggtggtttttgaagtgtttttgggagggttttggttttgttgaaaattgtagtttgttaggttgagttgttgtgtgttgggaggttaatagtgattgatgataaagggttaaggtgtaatttttaaagtggggatttgttgggtgaggtagaaattagtttttggggagatgggttttttttttttgatgtgtttttgtatatattgttgttttggtgttgggtttttgggtggggattttttttttgggtattgtggttttatttggtggagagttaggttttttttaggtttttaagtagggagtggatgtgggtggtggggaagggaagttgttggtgggatggagagtggggttttttggattttgggttgggtaggtttggtgttggtagttttgttgtatagatttgtgagtgatgttggtggttgtattgttgtgtggtgtgaattttaagtagattatttatgtttttattaataattttaaatattttattatatttatgttgtttgtttagagaaaataaaaggttatttttgaaattgtttgaaatgtaataatatttattaaagtgttttttaattatgtgatttaattaagtgtggtgtgtttgtgtttttggtttttgttggaaaggttggtgatgatggttattattattgttgttgttagtggttttgtgatagtagttggttagttttttagtttaggtttagtttttttagagagatttggggagttttattttgagggatggggttttttggaatgattttgaagttttggagattaggtgtggtttaggttttttgtttttttttagttttagttttagttttagttttagttttgggtaaatttttttaggttgagggtaggattttttttagatttttggggttttttgtgttttttggggatgtttgatttggttttttaggagggggaattttgggttttgagtttgggttttgttttgttggttgttttgttttttttagggttgagttttgtgtaatgtttgaagtagaaataaagagttgttgagatttgttttttgggttgtttttttatttttttagtttggaaggtgttttagagaggttttatttttagtttttatggagatttaggagggaagaagagttgggatttggtagttttgaggggttgttgggtttgtggtgttttttttgttgtagaggggttgggtgggagatgtaggtgggaaggattttgttttagttgagagttttttgtggggttgaggaatggtgaggattattgtttgtattaattgtttggaagaaattgggtggttagttgtttgattttatttgttgagatgtgaaatttggttgtgtggtttgggtgtgtgttgtttgtgtggaaggagttgtttttttttttttagtgaatgtatttggggttttttttttttgttaagttttttgtttggaaggggattggtaggttttgttgttgttgtgtgttttttttttttttttagtttttattttttttaattaatttttttttttttttttttttttttttttttttttggatgggtaattataggttttgttgttaagtgtgttgtgaggagttgttgtttgtttttgttggtgtttttttttgtggtagtttggttgagtttgtttagtttgtttaggatgtttttgatttgtgtgtttagttttatttagtggttgtgggatgttgtatttgagttttttttttaggttaaaattttgttttgaggtttttttgagagggttttattttttaata

SEQ ID NO: 95 - DNA, 4513 bp, Artificial Sequence
  chemically treated genomic DNA (Homo sapiens)
tgttggagaataaaatttttttagaaaaattttgggataaagttttggtttaaaggaaaaatttagatgtaatattttatggttattgaatgaaattgagtgtgtgggttagggatgttttaggtaggttgggtggatttggttaggttgttgtggggaggggtattgatgggaatgggtagtggttttttgtagtgtgtttggtagtggagtttgtgattatttatttagagagggaagaaaagagaagggaagaaaggaaagttagttggagggggtagaggttggggaaaggaggggggtatatggtgatgatagagtttgttagtttttttttagataaaggatttggtgggaggggggaattttgaatgtgtttgttgaaaggagggaggtggttttttttgtgtaggtagtgtgtgtttggattgtgtggttaagttttatattttgatagatggggttgagtggttggttgtttggttttttttagatggttggtgtaaatagtgatttttattattttttgattttatagaggatttttggttgggatagggttttttttgtttgtgttttttatttaatttttttgtggtggagaaagtgttgtaggtttggtagttttttagggttattgggttttggtttttttttttttttgggtttttgtggaggttgggggtggggtttttttgggatgttttttaggttgagggggtgaaaaggtggtttaggaggtagattttggtgattttttgtttttgttttgggtattgtgtggggtttagttttggagggggtggaatagttaatggggtggggtttgggtttaggatttggagtttttttttttagaaagttgggttgggtgtttttaggggatatagagggttttaagggtttggagaaagttttgtttttggtttggaagagtttgtttggggttggggttggggttggggttggggttggagaagggtagagggtttgggttgtgtttggtttttgggattttggagttgttttggggaattttattttttaaagtggggttttttgagtttttttgaggaaattgggtttggattgaagagttggttggttgttattatgaggttattaataatagtagtaataataattgttattgttagtttttttagtgagagttgagagtgtgggtgtattatgtttgattaaattatataattaggaggtgttttaatgaatattattatattttaggtgattttaagaatggttttttattttttttgggtaggtagtataaatataatgaagtgtttgagattattaataaaaatatgaatggtttatttggggtttgtgttgtgtggtaatgtggttattagtattgtttataaatttgtgtaatagagttgttagtgttaggtttgtttgatttagggtttgggggattttattttttgttttgttggtggttttttttttttattatttatgtttgttttttatttggaggtttggagagggtttagttttttgttgaatggggttgtgatgtttggaagaggggtttttgtttggaggtttggtgttggggtagtagtgtgtgtaggggtgtgttgggaaggggggatttatttttttggaggttgatttttgttttatttggtgaatttttgttttaggaattgtattttggttttttgttgttagttgttattaattttttagtgtgtggtggtttagtttggtaggttgtagtttttggtggagttgggatttttttgggggtgttttgggagttgttgaggtgagtggagattgtagagggtggatattaaattagtgggagatagaatgatttttagtagaattttagtgaataaatgttgttttttggttggttttgtggtggtaggtatatttgtatatagagtgtttgggtgtgtgttgtgtgtattggatgtttgggtgtatttgtgtttagtggtgtaggagtttttattgatttgatttttttattttaggaaaatagaaatgttggtgtttttttggtggttaggttggggttatttatatggttttttttttttgttttttaggagaaaggtagggtgggttggtattgttgttgttggtgggtgtagattttgggattttgattttagtttttatttatttagttttgttggtagagttgggtgtagtggagaaggagggtttttagtgttaaggagttttgttaggttttttttgttttgtatttttgtgggggtgtttgtttgggtaggtttgtagggtggtgggttttttgaggttaggatttttagatttttgtggagtttttgtttggttatggagtagtgtggagtaagtttagtttgggtttggtggggatatagttaggttttgggtgtgggggttgtttagtttgaaggagtaaggattttataaatgagttttttttttttgtatatttagggaattttttttttgtggggtaatagtttggttgggggtttagttgtggggtggtgtttgtagtttgggtttagatttgtggtatgtagagtttgggaggtttgagaggaattagtgggtagaggatttgggaaaggtgtattgatttttttgtaggtttgattttggtttttatggtgaaagtaggtaggtggtatagttgtggttttttatgagggagtagtttagattatatgttgttggattaaaatgtaataaatataggagtaaaaaaaaaaaaaaaaatttagtgttttaagggtttgaggatttatttagttttaaagagaaagaatattttttatgttattgtaagtttagtgtttgtttgaatatttttgaggatggggaatttattattttataaagttgtgttttgtttttttttagtgttatattttgaaaatagatttttaaaaaaatgattgttttatgttattgtatttttattaaaataagagagaggttaatatggtaatagaagttgtgttagtattttttgtttggtttttaatttatgaattttttgaattgtttagaagttggggtttgtggggaatgtgtggttttgtgttattagtgatgattttggggtgtagtttgggtttaggtaatgagaatttgggagtttttgtggtgagattttagttttttttttttagggttttgaaaattttgaggggtagtttttagattgttttttggtagggtagaggtttagtttagaggttttgtttttgtttgggaatgttaatggtttagttgtttggggaaatagaaaatgtttaaaaagttgtttttggtaatagattattagtttttgagttttttttatagggagaagaaaaaaaatttttaagttatgaaagtttggaaaaatagtaatttaatgtgtagattatttgtttaaagattttaaatattttttgatgagtggaatttagaggtgtggttagtataggtgaagttgattttttttttaattttgtttaggaagttgtataaagttttttgttttgggggggaaataataaaaggtaaataaaaatgatattttgaaaaggagagtttttttgttttagtggagtaaaaagtttttgtttttaggggaaagtgttttggtttagtatgggtggtagggttagtgagtatttagttggagggagatttgttgaattttgtaaaatttaaaaaaatgtagttattggaatagtattgtagttttgaatatttttttttggtaataaaatgtgtattttttttggttattttgtgtttatatgtgatatatttaaattgttttatttaaaaaaaaataataattattttttgttataaaggtatttggtatttgtttttaggtggggtgaaggttatgagtatttgagtattggggaggatgtttaggtagtttttttggatttagatatgtttagaaaatttattattttatttgggatttttagtattttataataaagagattttgttttatttaatgtaatttttaagaattttaatatataaaaatgtgggggtgggggtgtttataattttgataagtatagttgtaaatagaaatatttatttattttttataagattataaatatttgatattggaattgtaaaatgtatatgttttataaattaaaataataaagaaaataaaaaatagaaattaattttgttttttgttaaaaaggtatgttattttattgagttttttaagtagtagatggttatttagatttttaaattataatttttgtttttatatttttttttttaaaaaggtttatattattatgtataatgtaaaattattattgtaatgaaataaagaggtttaaggtaaagagtgaagtttatttttagtttttagggagattagtgggatttttagtttagttgtgtgtatatttttgggttagttgtgggtatattttttgggttgttttagttatagatggatagttggattggtttttttttatatatt

SEQ ID NO: 96 - DNA, 2280 bp, Artificial Sequence
  chemically treated genomic DNA (Homo sapiens)
tagtggtgagtatttgttgttggttttttagggtaggtagtattgttgttttaggtgtgtggagttggggagaaaaaaattgaatatgtgtgttatttagggtttttagataagtttttttgtgtgtatatatattttgaattggagtttagaaggttggatttgtgttttggggttgagttttttattttttgtttttagtttggaagattttagtttgtttgaaggtggtgtttgatttgttggtggatttggtgggtgtttgtttttgatatttggggatgaggtgggagtgttttgagtgttgggaagttttgttttgtgagtttttggtagtgatatgtgggagtgttgggtttggtatttttgatgtttttgaggttttgggtggttgttttgtttttttgggggtttttattttttaagtggttttaaatgattgaggatgggttttttgtgttgttgtagttgttattttttttgggaaaggttagtgattttggatgtgtaggttttgaaaattaaggtttagatttatattgagtgtttaaagattgtatttgaattttttttgttggttattgagggagagaaaggaatgtttagttttatttatatttatagaaagaagtgttgagggtgggggaaatgtagttttgttgggtgagttgggataggttttttgtttgttttttggttgttgtttttttttagttgaatggggagtgatttgttttgggtgtggtttttggggttgaagattgaggtgtagttttatttttggtttggtagtggtttggaagagagagggaaaggaggaatatttatttggttaagagatgttgttagagtttttaaagttggtgggggatggaggttggggttttggatttttagagtgtttgtagttgggtttttgggttttttggtgtggggaatttgattttgtagtttttgttagggtgtggtggggttgtaagaagggaggaaggagtgggattagagtttttgagggtgtgggtggtgtgtatttagttttgtttttttgtgtgttttgttgtttgtttgttttttttgttgtattgggtggttttggtttttgtgtttgtttgtttttgatgtttttgtgtggttttgtgttgtttgtggttagttttgttttgttttgtaaggagtgtgttgtttttttaattgaaatgggattaagattttagggtttttttgtttttttgttttgaggtgataggattttagttaatagattgaaaatgtgaaaagtatttgttgttttttgttttaagtgtttttgtggaaggattatttatttggaaaagtagaataaattttgttgttgttttttttttggaggtgtgtttattttagagtttttagatttattggtatttgttatatttttttttgggttttataggtaggattttaagaatgatatgggggtatttgggtgatttgtgggttgtaggtttttaagaggttgtttttttgtgtatggaagtgttgtagttttattttagtggaagtaatattaaattttattttagaggtttgttttgtaaagaatttagagtttattatatttgatattattttaaaataatatttgtttgttttaagaagttgggagaaattgataaaagaaaagttgaaatttatgttttttatttttattttaggagataattttgattaatagtttggtttgttttttatttttattttttaaaaataaataaataaataaataaattaaaatttattatatttttagattgtgtaggattatgtaggattttgtaaaaataaaaatgggattatattttatttgtttttgtaatggtttagtttttattagtaattattttttattagtatagtagaattaattttattttagtattattattattattttgagatagggttttattttgttatttaggttggagtatagtggtatgattttggtttattgtagtttttgttttttgggtttaagttgtttttttgttttattatttggttttttttttttaattagttgggattatagttatgtgttattaagtttggttaatttttgtatatttttgtggagataggttttattatgttgtttaggttgattttaaattattgaatttaagggatttatttattttggttttttaaattgttgggatggtagatttgagttattatattggtaaatttattttttataatggttgtgtggtatagaatttttattttataggtgtg

SEQ ID NO: 97 - DNA, 2280 bp, Artificial Sequence
  chemically treated genomic DNA (Homo sapiens)
tatatttataaaatggaaattttgtattatgtaattattataaagaataaatttgttggtgtggtggtttaggtttgttattttagtaatttgggaggttaaggtgggtggattttttgagtttagtagtttgagattagtttgggtaatatggtgaaatttgtttttataaaaatatataaaaattagttgggtttggtggtgtatgattgtagttttagttagttgaggggaaggggttgggtggtgagatgggaggatagtttgagtttaggaggtagaggttgtaatgagttaagattatgttattgtattttagtttgggtgataaagtgagattttgttttaaaataataatgataatattaaaataaggttaattttattatattgatagggaatgattattagtaggagttaggttgttgtagaaatgagtgaagtataattttatttttatttttataaaattttatgtaattttatataatttaaaagtatagtgggttttggtttgtttgtttgtttgtttgtttttaaggaatgggggtagggagtaaattaaattgttgattaggattattttttagagtagaaatgggaagtatggattttaattttttttttattgattttttttaattttttaaaataagtaagtgttattttaaaatagtgttaaatatagtaaattttggattttttgtaaaataaatttttaagataaggtttgatattgtttttgttaaaataaagttatgatatttttgtgtatgaaaaaatggttttttgaggatttgtaatttatagattatttaggtgtttttatattatttttgaaattttatttgtaaagtttaggaggaagtatagtgaatgttagtgggtttaggagttttggggtgagtatgtttttggaaggaaaatggtaatagaatttattttgtttttttaagtaaatgatttttttatagaggtatttgggataagaggtgatgggtattttttatgtttttgatttattggttaagattttattattttaaaataaggagatgaggaaattttgggattttgattttattttgattgagaaaataatatgttttttgtgaagtgaaatggggttggttgtgggtagtgtggaattatgtgaaggtgttgggggtgggtgggtgtggggattagggttatttggtgtagtaaagggggtaagtaggtggtagggtgtgtggggagataaggttgagtgtatgttgtttgtgtttttgaaggttttagttttatttttttttttttttttgtagttttgttgtgttttggtgaaggttatagggttaggttttttgtattgaggagtttagaagtttggttgtgggtgttttgaagatttgggattttggtttttgttttttgttagttttagggattttggtggtgttttttagttgggtagatgtttttttttttttttttttttttaagttgttgttaggttgggggtgaggttgtattttagtttttagttttgaaggttgtgtttggggtgggttgttttttatttagttaagaggaagtagtggttggggggtaggtgaggaatttgttttggtttatttggtaagattgtgttttttttatttttggtgtttttttttgtgaatgtgaatggaattaagtgttttttttttttttttaatggttggtgaggagaatttaaatgtggtttttgggtgtttggtatgggtttggattttggtttttagagtttgtgtgtttaaggttgttagttttttttgaaggaagtgatagttgtggtggtgtgggaggtttatttttggttgtttaaagttatttaaggaataaaagtttttgagagagtaaaatgattatttgaaattttggaagtgttgggggtgttgggtttaatgtttttatgtgttattgttggggatttgtgaggtgaagttttttagtgtttaaggtgtttttgttttgtttttaggtattaggaatagatatttattaggtttattagtgggttagatgttgtttttgggtaggttgggattttttgaattgggagtggagagtaaggggtttgattttgggatgtgagtttggttttttggattttggtttagggtgtgtgtgtgtgtggaggggtttatttgggggttttgggtagtatatgtgtttggtttttttttttttgattttgtatgtttggagtggtaatattgtttgttttagaaggttagtggtgagtgtttgttatta

SEQ ID NO: 98 - DNA, 3640 bp, Artificial Sequence
  chemically treated genomic DNA (Homo sapiens)
aatttttagaaattaatttgttataattttatgatattgtaatattttttggaagagatatatgtggatgtttttatagtaagattttgtgataagtaatttttatgtttgtattaaaataattagattgttttgtgattggtttagttatttagtttaattttattattttaggaggaaattaaattttgttagtattaatatatttgtattaaaataagaatttatataaatttattgatagaaggtaggaatttatgattgtgtattaaatttatttatataagaaatatttttttttttattggattttatgagattgatattttttatgtagaaataatgtggttttttttttttaaagatgtttatttattttatttaaatagagatataatgagagtattatttaataaatatttgttaaatgttttttttagtattataagaaatgtattttttaataattataattttagtaatattttttttttgttgttattttaggttgggggttatttaattttattaagagtgtggaaattttgttgttttaatggggattgaaaggaaattagttattttttatttaaattattaaggtttttagattgatttaaaatattaagttggtgtttaaatattttaataaatggattttataaagagtataagtaatgttatttgaggaataaggttttaagttgaggagtaggatattggagagttttttttttaattatttatttttattagatttgaggattttttgttttataagaaaattagaaataaattttattggtatgttttgtaagaatgattttttttgataatttggggtagtagtatttgtttgattagttgaatttgttatgaatgtggaaataatgatattaaaatagtttgtgtaataatttttttaaagattttgtagattagagatgattatagattttttttagtgtggattaaagggattgaattgaatgttttagtttaatgatttaatttttgttatatttatagggatgtgaattttgattttataagtaggtgtgtatgtgtatttagatatttatataaagttgtgtggagggatgaaaagattaattatttgattgatgaggataggtttgatttttttgattattttagtgtgttagtgtatatttttggttgggtttagtgttttaagaaattttggaattttagttgttaatttttgtttttttattatgattttttaaagatattttatttgtttattggggtgaagagaaatgggattaggtgttagggtggtgggattttgtttagggttttgattttgtgttagggttttagattagttggtttttgaaggtttttttatttattttatataagaggaaataaagattttttagtttaaggttttagggttgttttttgattttggttagtttgtaggaagaggaaataataaaataaaggaattgttaatttgttgggtattatattttttagttttaatttttgattttggattgttagggttattttttttatgttgattttgttttttttaaatgaaaatatgttaataaaagtatattttggatataaaatttaagtatgtattttttttggggaggttagagttgaggtgtattttggaagatgagaattttgtttttatgaattgggtaatatttaggtattgttaggtattttgatagattttttagatattttttttttttttttttatattttttttttattaaaatagttattgttttgaaatttattagaataatgatgttttaaaaataaaggtgtagtaagtatttttttttttgttgttgtgggttgaattatggatgtttgtgggttgtttagttttgatggtttgtagggggtgtgtgttgtagttgtagtatagtttggttatttttagaaagggagttgaatggagggaagtagggagtgtggagggtttgaggtttgtagataaggagaggtgtattttgggatttgggttttttgttgttataatataattgtgttattgttggtattgtttgatttaagtgttggtggtaagtggtgatgttggggttgggtttttagtaattgttgtgttttgggttaggttggttgttttagttattgggatttttttttggatgtttttagggtgataggtgttgtatttattgatgggatagttgtatatttttgaataggtagtggagtttgtttttggtaggtattttagttgtgttgatattaaggttgttatataatagttattagttttttttaagttttagaagtaggttttttttgttttagttatagtggttttagttgttgttatgagtttattttttatttttaagtgtatttttttttttttatttgggtttatgtttgttatatagagagaattatatagggggaattatggttttatatttttgaggggatagatattggttgtgagataggtattatgtagagttttttggtgattgtttgtaggagtgagattttttttggttttgtagttggttaggtgtgtgtgtgtgagggtttttagttgattattgggatgtattgttattttttggtttggtgggttttgggattttttggtttttgtaggaggttattttaggtttttggaggaggtgtttttagttggtggtgttttttgttttgggtttagaggtggatatggttggttgtgttttgttggttttttgtttgtgttgtagtgggttgggagtagttgtgtgatattagatttatagtgttaagatgtgaagtgtgaggaaattgttgtgtttgatttttttttttttaatttttggatttaggaatgtttttagtttttgtgttttatatgtttagttttggttttttttttggtttagaagtttttaaggattgaagggttttgtttagggttttgtatttttgtttgatttttatggtttagaaaagtagggggatatttgaaatgttattttgggataaatattaataaaaaagtaaatggatttgtgtaggggttagttattaattaattaggttgtaaggttatttagggtaaatatagtttaggttgggttgggtgagatttttttatggttgttttttgattgaatttttttttttttggtttaggttttttttaggttgttttggggtaaatattggatgggaagggggtgttgttaatttttttgtggggtttggaggtttttttgtttttaagttttgtagggtagggttggagtgtttaatatttatttttgtttgaattttgggtttgtgtgttgtttttttttgggtttgtggtgttgtgtttgttgttgggtgtgtgttgttgtttttttttgagttggtagtttttgttgtgtggttgaagttttttggaatttttaattggaaattaattttggttttgatagatgtttatgttagaggtgtgttatttatttatattttttgttttattttggaggagatgtggtgagaattttgttgttttgttttttaatggggtagtagtaagtagtatatggagggaatatatattgatttttaaaaggtagttaatttggtgggaatttttttttgttgtttt

SEQ ID NO: 99 - DNA, 3640 bp, Artificial Sequence
  chemically treated genomic DNA (Homo sapiens)
agggtgataggaggaaatttttattaaattaattattttttaaaaattaatatatgttttttttatgtattatttgttgttgttttattaaagagtagagtgatagggtttttgttgtgttttttttgggatgaggtggggggtgtgggtgggtggtgtgtttttgatgtgggtgtttattaagattaagattagtttttaattaaagattttagagggttttggttatatagtaggagttgttggtttggaaagagatagtgatatatatttaatagtaagtgtagtattgtggatttaggggaaggtggtgtgtaggtttgaggtttgggtgggggtgggtgttgggtattttgattttgttttgtgggatttggaggtgaggaaatttttaaattttgtgggggagttggtggtgttttttttttgtttggtgtttgttttagaatgatttaagaaggatttgagttaaggggggaggggtttggttggggggtggttatgagaaagttttgtttagtttaatttgggttgtgtttgttttgagtggttttgtggtttggttgattgataattggtttttgtataagtttatttgtttttttgttaatatttattttggggtgatattttaaatgtttttttgtttttttgggttatgggagttaggtaggagtgtggggttttaggtagagttttttaatttttgaagatttttgggttgggagagaagttaggattgggtgtgtgggatgtaggagttggaagtgtttttgggtttaagagttgggggagaaggagttaagtgtagtggtttttttgtgttttgtgttttggtgttgtgggtttggtgttgtgtagttgtttttagtttgttgtggtgtgaataaagggttagtagggtgtgattgattgtgtttgtttttgagtttggggtgaggggtgttgttagttgggagtgttttttttgaaggtttaggatggttttttatggagattaaggagttttagagtttgttaggttgaaaagtggtagtgtattttggtagttaattggggatttttatatatatatatttagttgattgtaaaattaaaaaaggttttgtttttgtggatagttattagaaggttttgtgtggtgtttgttttatggttggtgtttgtttttttgagggtgtaggattatagttttttttgtgtagttttttttgtgtaatgggtataaatttgggtgaggagagggaggtgtgtttggggataagaagtgggtttgtggtgatgattggaattgttatggttggggtaggggaaatttatttttggggtttaaggggggttgatggttattgtgtggtgattttggtgttagtgtagttaggatgtttgttagagatgaattttattatttgtttggaggtatgtggttattttgttaatgggtgtagtatttattgttttggaagtatttggagagggattttggtagttggggtgattagtttgatttagggtatagtggttgttagagatttagttttgatattgttgtttattattgatatttgggttggatagtgttaataatagtatggttgtgttgtagtagtagaggatttaaattttaggatgtgtttttttttatttgtaagttttgagttttttgtgttttttgtttttttttatttggttttttttttgggggtagttgggttgtgttgtggttgtggtgtgtgttttttgtgggttgttggggttgggtgatttgtgagtgtttgtggtttagtttgtggtagtgaagaaagggatgtttgttgtgtttttgtttttagaatgttgttgttttagtgaattttaaaataataattattttgataggaagaaagtgtgaaggaggaagagaaggatatttagagggtttgttggggtatttaataatgtttgggtgttatttaatttatgaaaataaaatttttattttttgaagtatattttagttttaatttttttaaaaaagatgtgtatttggattttgtatttgaagtatgtttttgttggtgtgtttttatttaagaaaagtggggttagtgtagagaaggtgattttggtggtttgaagttggaggttggagttgagggatataatatttggtggattggtggtttttttgttttgttgttttttttttttgtaaattgattggagttaggaggtagttttgaggttttgagttgagaagtttttgtttttttttgtgtggggtgggtgaaagggtttttggaggttgattggtttggagttttggtgtggagttaggattttggatagggttttattgttttgatgtttggttttatttttttttgttttggtaggtagatagaatgtttttgggaagttatagtaagaaaataaaaattaatagttaaagttttgaagttttttagggtgttaggtttagttgggaatatatattggtatattgaggtaattgaaaagattaaatttatttttgttgattgggtggttgatttttttgtttttttatgtggttttgtgtgagtatttgagtgtatgtgtatatttgtttataaaattggaatttgtgtttttgtgggtgtgataggggttggattattaagttaaaatgtttaatttagtttttttgatttgtgttggggaaaatttatagttatttttaatttatgaggtttttaaggaggttgttatatgagttgttttgatgttattatttttatatttatggtaaatttagttaattaaataaatgttgttattttaagttattagaagaaattgtttttatagagtatattaataaaatttatttttgatttttttgtaagatagaaaatttttaagtttaataaaggtgggtaattaagaaggaggttttttaatattttgttttttagtttgaggttttgttttttaagtgatattgtttgtgttttttgtaaagtttatttattggaatatttaaatattgatttaatattttaaattaatttaggagttttgatggtttgaatgagaaatgattagtttttttttagtttttattaaaatagtagaatttttatatttttggtaaaattgaatggtttttaatttagggtagtaatagaaggaaggtgttattgaagttgtggttgttagagggtgtattttttataatgttggagaaaatatttaataaatatttattaaataatatttttattgtgtttttatttgaataagatggataagtatttttgggagaagaaagttatattatttttatataaaaaatgttagttttatagagtttagtaaaaagaaaaatattttttatgtgaatggatttagtgtataattataaatttttattttttattaataggtttgtataggtttttattttaatataagtatgttaatattaatgaagtttaatttttttttgagataataagattgggttaggtgattagattaattataagataatttgattattttgatataaatataaaaattatttattatagggttttgttatagaagtatttatatatgttttttttaagagatgttatggtattataaaattgtaataaattaatttttagaaatt

SEQ ID NO: 100 - DNA, 3240 bp, Artificial Sequence
  chemically treated genomic DNA (Homo sapiens)
gaaattgaggtataaggtagtaatgattattgagggttttgtttttgtttttttaggtgaggagtttattttaggggttttagtttgaaagtttagaggtgaggggtgtgtattataatttttagaggtttttggatttaagggtggtttttgttttttgttttttttgtgtgatgaagttgggtttattaatgggagtttggagtggggtgagtaggggtgggatggggtgggattgtggggaggtggttggtgggttgtgttgtgagttagtattttagagagtgtggggtttggatagttgtgtgttgagggttttggggtgggtgttgtgggatttttttgggttatgggtaagtggttttgtggtgtggtttggataggggtttggtggttttgtagggaggtttaaggtgttggtgttgggttttttttagtttttgtggtagttggtgtgttgtgtggggtggagaggggtttggggtgggttttggggtgtgggttaaggggagtgagtttggtttgtggttttagtgttttttggttggtgtggaaggggtgaggttgggtgtttgtgtgagttttgagaaaaggaaagataaaaagttttggtggttaggggttttttgggtgtttattttgaaattttttttgttgttttttgtttgaaatatgttgagtttggtatggttttgttgttttattttttgttgtggtttttattttgagttgggtttagttaatttgttgtgatagttgttggtagttgtttttttgttttgtgatattttgtaggttttagaattgtggtgttgttgggtatagattttgggtttagagtgtgtggtttttttttttgtggttgttgttttttgaaaggggttgtgtgggtgtgaagaatttgtttaatgtgttttgtaggatttattgttttttttttggttgtgggttgtgttgatggtttggggagtttggttttttgttttttgtttttttttttttttttttttttttttttttttttttgtttttttgtttatttgttgtagttttataggagaggggttgtttttttggttgttttttttttttgttttttgtgtgtttttttgtttttttttggtttgtagaagggatggggtggtggttggggagtgttaggggaagagggtaagagtgtgggttatgagtttgtaggtgatgtttggttttgtgtttggtgggagttgtgggttaatttgggtttgtgttttgtttttttgtggtgtttaggggttgtttgggttggggttgtgttattttttgtttagtgttggtgtggtggggtttgtgtggtgtaggatttttgagggtttagggggttttaaggtgttgtgggtttagtgtttttttgtttgtagagttttgggttagtaaggagtgttttgtgggttttaggggaggataataggtgttttttgttttatttgggtttttttggtgggagtttatatgtatggtggtgttattgtgtttataggtaatgttagagtataggaggggtgggaggttggggtttgagggttttattttgtagtagagtttagagtttaatttaggttttagggatttgtttggggtttagaatttggtgtggtagaggtagaaagggtttttgataatttgtttttatagttgagagatgttaattggtatttttgagtttttgttttgtaggtgaaatgggaatatatgaaattatttgaggagtttttattgtttgttattattaaatgtggtttagattttgtggggagggatagttttattttggaattggggtttttaggatattttagagtttggtaagagggatagggagaatggggtttggaagttggtagttttatatttagtgttttttgtatttttttttttttttgtattttttggtggtttttgtggttttagttgtttttagattttgttttttttgtttttttttaagttgaggtattgaggttgggttgtggtttgagttgtatttgtgttttgttagggagtgggggttttaggtttattgtgtttttttttattgttggttttagtttaatatttggtaggtttttttttttaaattgttggagtaagtttgtgtagatttggtttggttgttgtttttgggttgttgagtggattggttgttttgttgttttaaaggttgtttttgttttgttttagtttaagtttagagaaatttaagttaataattttagttgagggggtggggtggtgtttgttggttgttattgaggttgttgttattattattgtggtaattgatgtagtgtttttagttggtgattttttatgaaaggaagtgttattttttttttattatatttagggtgagtggggtgggtagtagaaagatggggagggagagaaggaaaggggtgtgtgtttttagtagatttttaaatttgagagttgtgtggttttgtattagttattgtttttttttgggtaataggggtttgtaagtttattgtgtttattttgtatttaggaggttgatgtttttggagtatttgttgggtagtgaggtgttttggggagggagtaggataggtaggtttttgatttttttattgagtttggttgtggtttgtgggggaagttttttttttttttttatttttttttgttgagaatattgggtatattgagtttagtatgtttattttgtagatggggaaagggagatatagaattagtgattaatttggtaagaggtgtagttatgtagtgttggaattttttgttttatttgtttttttggtttatttttatttgtttttagtttgatgtttggtagggtaggggtttattgatttttttgtatttatttattgtttggttttatagttattttttagttttggttaagttttgtgagatattttaagtttgtttttagtgatttttaattattgtttgattgtttttatttttttgtttttgtatatttgtttttgttttgttaggttggttgggttttggttagagttggttttttatttttttaggtaataggtagtagttttttaaatggaattttagtaggtattaataggttttttttttttttttaagattatggagataatattttttatttaaagatggtgggttttttgggttttttttgatttaggttagggaagttgatttatagagtgtgggggttatgtttttttt

SEQ ID NO: 101 - DNA, 3240 bp, Artificial Sequence
  chemically treated genomic DNA (Homo sapiens)
ggaaggggtatggtttttatattttatgaattaatttttttggtttgggttggggagggtttagaggatttattatttttgaataaggggtgttatttttataattttgaggaaggaggaaagatttgttgatatttattgagattttatttaaaaaattgttatttgttatttgagagagtagggggttagttttggttagggtttaattaatttggtgaagtaaaggtaggtatgtaaaggtaggaaggtgaaggtagttgggtggtggttgagagttattgaagataaatttaagatgttttatggggtttagttaggattagaaggtagttatggggttaggtagtgggtggatgtggggaagttagtgggtttttgttttgttagatattaagttggaagtagatgaaagtgggttaagaggatagatggggtaaggggttttagtattgtatggttgtattttttattaagttggttattggttttgtatttttttttttttatttataagatgggtgtgttagatttaatgtgtttaatgtttttagtagaaaaaagtgagaagagaaaggaggttttttttataaattatagttaggtttagtgagaagattagaggtttgtttgttttgttttttttttaaggtattttgttgtttagtaggtgttttggaaatattagttttttgggtgtaggatgagtgtaatggatttatagatttttgttgtttagagaggggtagtgattagtataaggttatatagtttttaagtttaagggtttgttggaggtatatatttttttttttttttttttttttatttttttgttgtttgttttatttattttgggtgtgatgggaaggaagtgatatttttttttatgaaaagttattgattgggaatattgtgttaattattataataatggtaatagtagttttaataataattagtagatgttgttttgtttttttggttgaggttgttggtttaagtttttttaagtttgagttggagtaaaataaagatagtttttgaagtggtgaaatggttggtttatttggtagtttgggagtggtggttaggttgagtttatgtgagtttgttttagtagtttggggaggggggtttgttaagtgttgagttggagttagtagtgagaagaaatgtgatgggtttgggatttttattttttaatagggtataggtgtagtttaagttatagtttaattttagtattttagtttgggggagggtgagagagatagggtttgggggtagttgaggttataagagttattagagggtatagaaagggaaggaggtgtgggggatattgaatgtgaggttattaatttttaagttttattttttttgttttttttattgggttttgggatgttttaaaagttttagttttaggatgggattgtttttttttatggagtttgggttatatttggtggtgatggatagtgagagttttttagatggttttgtgtgtttttattttatttatggggtagaggtttagaggtgttagttgatgttttttaattgtagaagtagattattggaggttttttttatttttgttatattaagttttaggttttaggtgggtttttaaggtttggattgggttttgagttttgttgtggggtgaagtttttgagttttgattttttattttttttgtgttttagtgttgtttgtaggtgtagtgatgttattgtgtgtgtgggtttttattagaggagtttgggtggggtaagaggtatttgttgtttttttttggggtttgtggagtattttttattggtttaagattttgtaaataaagggatattggatttgtagtgttttgggattttttgggtttttgggggttttgtattgtgtaagttttattatgttggtgttgggtggagggtgatgtgattttagtttgggtgatttttagatattgtggagggatggagtgtgggtttgggttggtttgtagtttttgttgagtgtgaagttgggtattgtttgtaagtttgtagtttatgtttttgttttttttttttgatgttttttagttgttattttgttttttttgtagattgagggaagataaggggatatataagggataggagaggagagtaattagggaagtgattttttttttgtggggttgtggtgggtgggtggagagataggagaggaaaagagaaaagggaagagaaggaaggggtagggggtgagaagttgggttttttggattattggtgtagtttgtggttgaaagaggaatagtggattttataaagtgtattgagtaagttttttatatttgtgtagttttttttaggaaatggtggttgtagaggaaagggttgtgtgttttggatttggagtttgtgtttggtggtgttgtggttttgaaatttgtgggatgttatggggtggaggggtggttgttgatagttgttataataaattagttgagtttagtttgaggtggaaattgtagtaggaagtgggatgatagagttgtattgggtttggtatattttaggtaagagatggtgaaaagagttttgagataaatgtttgggaagtttttggttgttaaaattttttgttttttttttttttgaagtttgtgtggatgtttagttttattttttttgtgttggttggggagtgttgaagttgtgggttgggtttgttttttttggtttgtgttttgaaatttattttgggtttttttttgttttatatagtgtattgattgttatgagggttggaggggatttggtgttggtattttgaatttttttgtagggttgttgagtttttgtttgggttgtgttgtagagttgtttatttatggtttggagaggttttgtggtgtttgttttgagatttttagtgtgtggttgtttggattttgtgttttttgagatattggtttgtggtgtggtttgttggttatttttttgtagttttgttttgttttgtttttgtttgttttattttgggtttttattggtaagtttggttttgttgtgtggagaaggtggggggtggggattgtttttgagtttggggatttttgggaattgtagtgtgtgttttttgtttttaggtttttagattggagtttttggaataggttttttatttagaggagtggaggtaggatttttagtaattattgttgttttgtgttttagtttt

SEQ ID NO: 102 - DNA, 2155 bp, Artificial Sequence
  chemically treated genomic DNA (Homo sapiens)
tttttttttttttttatttttggagggttttagttattagttttgaagttgtagtgagagttatttattgttttggtttttgggattttttgagtaggagaaaaaaattagaaaattaaaagagagagagagatttggaaggaagaagtaatggaggagggagatagggggaatgagaggggagtttatattatagagagagaattttttaaaggaagtgtaggtgtttatgggataggagtgtggaagaaaagagtagaaaaggaaaagtagttttaagtaagagaaagtaaggagaggtggatagggaggggaagagttaagagaagttaagttgagggatttgtagtaattttgagaaataaaagtgaattgtttgtgggtggttgttgtgattttagtaaaaagtggagtttaaggtttagggattttgttgtttatattgtgttttgttttattttggatgtttttaattttagttttaggtatagtatatgagtaggggtagtaaggtttggttagggttggtgttgtatgggagttgtgggtttttgtaatatttaggtgtgtaggtgttataagaaggagttggggttgttgtttttgtagtgtggattttgttttgtgttgtatatgttttagaagagtgtgtttggaagtgttttttttggttttttttgttttttaagatttgtttgtaatgtttatatttgttattattgtataagtattagggtgaggaggtttttttgtaggaattaatattgattttagttttttgtttttttaaagtttttttttgatgatggtgagatttatattttaagttagaagaaaataaaattttgtttattttgggtttatgattgtataaaatttaaaatgttgttggtatgaagatgtagttggaagattttagaaatttagtattaggaggtagagattttatagtgtttagagatgagtttttaaataaattaagaattatgtagtgggaaattaaggaggagggtttgaggggttgattttagagggatagatagagaaattgagagtgaaatatttaaggaagtggaataaattgttgtagttaggtgtttttgtttttttggaaatttgaaatttgtttaaattttattttaggtgtttatggtattagttgtagggttttgtattataggggttgttattttttgtttttggagtttttatgttgagatttattatttgttggtttttttttttttttttttttttgtttttttattttttaaatataagataaaaatatattttatttattattatagatatatatattttatttttattatataaatataaaatatttaaatatttaaaatatttagaataaagttagtagtttggatttagtgatatttatttgtgtttgaattgtttattattttttttattatttgtttagaaaaaaaaaaaagatgaaaaagagggggagagtttttgatgtaaataatttataataaaattattattttaaaaaagtgttttttgtttgttttagatggatgaatatattttagatattgtggtattttgtagtttgggtttgtgattttggttaaaatgtgggtggttgtggttgtagggatgattgttgttgtgtagggtaaggaaagagggtgttgtggtttgtgttttgatttgggattattgaaattttaagattggggaggtgaggggagtgttttttttattaattatataagatgttatttggattttgagattattgttagaggaggtttgattatttagtggtgtttttgtttttttttttgtaaagaattgtttagaaatttagatgttttttgtgtgtaggaagggttttgtgaatttgggtgtttgggagaggaggtaatgagtgttgatttgttttttaaattgagtaattgtgtttgaagttatgtgtttgggaggttgtagggtgaagtgttggttgtgtaggttattgttggtagttgttttgtttttttttggaggagtgggaagttgttggttattgttttgaataggtttggagaaaagattttgaattttttttgattagtggtgttatttttttttttgttttttttttattaaatttttgtttaaagttataatatttagaatt

SEQ ID NO: 103 - DNA, 2155 bp, Artificial Sequence
  chemically treated genomic DNA (Homo sapiens)
ggttttgggtgttgtaattttaaataggaatttaatgggggaaaagtaaaggaaaaggtaatgttgttaattaaaggaaatttagaattttttttttgagtttgtttggggtggtggttgatagttttttatttttttaggaaagagtaaagtggttgttggtggtagtttgtgtagttggtgttttattttatggttttttaggtgtgtagttttgggtataattgtttggtttggaaaatgagttagtatttattgtttttttttttaaatatttggatttataaaattttttttgtatgtaggaaatgtttggatttttgagtagttttttgtggaaggggaggtagggatgttgttgggtggttgggttttttttagtagtagttttggagtttagatagtgttttgtgtgattgataggaaagatattttttttgtttttttagttttagggttttagtggttttaaattagaatatgaattgtgatattttttttttttattttgtgtagtggtgattgtttttatagttatggttatttatattttaattaaaattatagatttagattgtgaggtgttgtagtgtttagaatgtatttatttatttgaagtaagtgaaaaatatttttttaaaatagtaattttattgtaaattatttatgttggaaatttttttttttttttttattttttttttttttttaggtaaatagtgaagaaaataatgaatgatttaaatgtgggtaggtgttattgaatttaggttattaattttgttttgaatgttttggatatttggatgttttgtatttatgtggtgagagtgaaatatatatatttatgatgataaatgaggtgtatttttgttttatatttgaaggataaaaaaataaaagaagaaaaggaagaaagagttagtaaatgatgagttttggtgtggggattttgggggtagagggtggtagtttttatagtgtggggttttgtgattggtattgtgagtgtttgggatgaggtttgggtggattttgggtttttggagaggtagagatgtttggttatgatgatttgttttatttttttgagtgttttgtttttgatttttttatttgtttttttgaggttggttttttagatttttttttttaattttttattgtgtaatttttagtttatttaggaatttatttttgggtattataaagtttttgttttttaatgttaggtttttagagttttttagttgtatttttatgttggtagtattttggattttgtgtaattatgggtttagaataggtaaggttttatttttttttgatttagaatataagttttgttattgttaaagagaaattttgaaggagtaggagattgaaattgatattaatttttgtaaagagatttttttattttggtgtttatgtggtggtgatgggtgtagatgttgtaaataaattttgggaagtgaggagggttggggaggatatttttggatatgtttttttaaagtgtgtgtagtatggggtgaagtttgtgttgtgggggtagtggttttggtttttttttgtagtgtttgtatatttgggtgttgtagggatttgtagtttttgtgtggtattggttttagttaggttttattgtttttatttgtgtattgtgtttgaagttgaagttggaggtatttaaaataaggtggggtatagtgtgggtggtggagtttttgagttttgagttttgttttttgttgagattatagtagttgtttatagatagtttatttttattttttaaagttgttgtagattttttagtttggttttttttggttttttttttttttgtttgtttttttttatttttttttgtttgaaattgtttttttttttttattttttttttttgtgtttttgttttgtaaatgtttgtgttttttttaaggagttttttttttgtggtgtgggttttttttttgttttttttgttttttttttttattattttttttttttaggttttttttttttttttggttttttggttttttttttttgtttaaggggttttaaaggttaaggtagtgggtggtttttgttgtagttttaaggttggtggttgggattttttaggggtgagaaggaagggaga

SEQ ID NO: 104 - DNA, 28 bp, Artificial Sequence
  chemically treated genomic DNA (Homo sapiens)
tatcgcggagattttcgagttttcgttg

SEQ ID NO: 105 - DNA, 19 bp, Artificial Sequence
  chemically treated genomic DNA (Homo sapiens)
ggggttgtttttcgggatt

SEQ ID NO: 106 - DNA, 24 bp, Artificial Sequence
  chemically treated genomic DNA (Homo sapiens)
gataaccctaaaacgcaactcgaa

SEQ ID NO: 107 - DNA, 20 bp, Artificial Sequence
  chemically treated genomic DNA (Homo sapiens)
cgtttcgtaaggagcgtgtt

SEQ ID NO: 108 - DNA, 24 bp, Artificial Sequence
  chemically treated genomic DNA (Homo sapiens)
cgcgttgttcgcggttagtttcgt

SEQ ID NO: 109 - DNA, 16 bp, Artificial Sequence
  chemically treated genomic DNA (Homo sapiens)
cgacgttttcgcgtgg

SEQ ID NO: 110 - DNA, 29 bp, Artificial Sequence
  chemically treated genomic DNA (Homo sapiens)
gttttgaaatttattagaataacgacgtt

SEQ ID NO: 111 - DNA, 31 bp, Artificial Sequence
  chemically treated genomic DNA (Homo sapiens)
ctttctaaaaataaccgaactatactacgac

SEQ ID NO: 112 - DNA, 21 bp, Artificial Sequence
  chemically treated genomic DNA (Homo sapiens)
tacggacgttcgcgggtcgtt

SEQ ID NO: 113 - DNA, 24 bp, Artificial Sequence
  chemically treated genomic DNA (Homo sapiens)
agtaagttcgcgtagattcggttt

SEQ ID NO: 114 - DNA, 21 bp, Artificial Sequence
  chemically treated genomic DNA (Homo sapiens)
taaaacgacgaaacgaccgat

SEQ ID NO: 115 - DNA, 24 bp, Artificial Sequence
  chemically treated genomic DNA (Homo sapiens)
tcgtcgttttcgggttgtcgagtg

SEQ ID NO: 116 - DNA, 24 bp, Artificial Sequence
  chemically treated genomic DNA (Homo sapiens)
aaggaagtggaataaatcgtcgta

SEQ ID NO: 117 - DNA, 33 bp, Artificial Sequence
  chemically treated genomic DNA (Homo sapiens)
aggcgtttttgttttttcggaaattcgaaattc

SEQ ID NO: 118 - DNA, 25 bp, Artificial Sequence
  chemically treated genomic DNA (Homo sapiens)
ctacgactaataccgtaaacgccta

SEQ ID NO: 119 - DNA, 9739 bp, Homo Sapiens
acggaagcatagaaatgtattcaataaatatgcaacagaaggacaatcaatctaatatcaaagtgactagagagttaatgccagggctccatgggtatgctgacattccagaatagagaggactgaaggtcagagactctgggtaacctgcacattaagaacgtcctcaagttatcggggggaaagatagagtcctttctgttctacacaaaggggcagatctaaaatcacagtccctcaaaatctctaaaaatttttgcaagatttgaagagagctttgttccaaactccagtgcacacaatataaacacacattatcaatacttacaataagagattggaattaaagtgcacaccacctcccaaagtttttcaaaactgcttctaatcacaaaaaggtaaattaaaaatcctctctatgttacagtagtttaaaaggtaaataatggaagtagaaaggagatgtacatttgttgaaacctgttatgtaccaggcaccttacataacttatttttatttgatcctcacaataattggcaaggtgtgtgctgcaggacactaagaggtcatagattttaggaggctaagaaatgacctaaaactttacatctaatagttggtatagcaaagatttgaagtcaagaatatctgcctctaaaaattagccgtatactatgacaacacatcccaaataaagatgtataaaaagtacttggctcttcatagatattatataaaatatgggacaatattagtgatatacctaaatttagacattagaaagaagtccttcttaatttactctgtaattgtaactcagttgttcatcttacaggtccctatagtaataattaaacattcctttctttgttttatatgtgttttcaaactgctattaaagatccttggtcagcagcctttatatcttttggcgttttgctgctaatgctcggtaaacatgggcagccaaggaaaatgcagatggtgctatggaacacaaaccacgacaacatatggtatacatttagtcctaacaaagtgcgcttcttaacctctgggtgtcgcttcaccattcctttataagactactcatttccagggaaggtttagtttccaaaaccagggcaacaggcccacatgtgttatatggccattcagatgcacagattatgtgtcctaatacctttaagcaagtgcatttagcacatgcttcctagcactatcatgtgtatttatgaactgttttgcccagatggtaagctcctcgaggacaagtgccatgcctgaaatctcaccttattaactgtgcatggcagagtaacaatgttatctatcttgcatatagagacacacaacctataaattgctcttctaggtaaacctcctaactacactgctacattgtgacaattgtcacatcttctagatgaggctcacacaggctaagcaattagccagaatcacaaactaacaggcaatgttttcttcttgcccacaagagaaagcttttcttgtcttgcaacactttattgtttttttcttttaaggtttttattacaaaggtcaatgtctattggccttttaataaaagtaattattatttagtacttagtatacatatgcaaggcattgttctaagggttttacaaatattaactcatttaatcctcctaaccattccatgagatagacactatttttatccacattttacagataaggaaactgagggacagagagattaacttgtccaaaatcagaggactggtaaacagtagcagtgaaatttgaatccagcagtgaagcatagctccacagtgtgtgctcttaaacatacactattctgcttgaataagagtctacaaagatccttactcaggacatatgaggagttgttcagcaagaaaagaagcatgtttactcctccctatttgatgtatttgattatattctaaaacctttcctcatgccaatagaactccgcgtattatactaaactttcctgcaccgaaggcatatgtaatggttaccttgactgacatgtaaaatacccaaaacaaaataccccgagactcgaggattttttgtttcatgaattagacaccaaaaaaaaaattgtctaggcatcagaagtgttatacactcacatctgtaagtctttcttgggattttcagatttcttatacaagatttttttttgtctgaaatatttcagtgctcactcaatgcctgagcttgaaaattatctaatcctttttaattttttcattttcagctactttgccttcaggcatagggcagggcaagcacttgctttcaatatgatgtttaacactttttatgtttttattttcgtcatcttgaaaacatgctagtaaacatccaaacatactgtaaagatttaaaatttggggtgtgtatacgtatatcaacaggagttatgaattatgtatattgcaggcctatataaattagattttgaagaacaagcatcacagtaatcaagcgggtcataataagacattccatgtgaaatgtaaaaactaccttgaataaattatctgtaagttaacattctcattagaatgacatatttattatttctgggtttgtgatattgctttaatgtattttggctaactgttttaatggcatattaagaaaccatttcaggccttttttccccgttggaatttgcagacttttatttccgtttgaactaaaataatataatattaaaaacaatcccccacttcccaatgtacaataccattttcttctgcccagaaatatttaattaaagcaggatataacctcagtaattatttttacacagaatgactcttaaattaatagtcagttgtatgactaaaaattgggagactgacaatcaaaacaatcttaaatgctttgtttatgtgatgaaaatgagtgatcctttaattccctcacacacattaaactgatttcacagattttctgtactggtgtttaacatagtcaagtgcttgaggttatgtaaaataaacaatcttgagatcttattgcaaatgtttgcaatttatgatgtaaactgatttgtgaagaaaaaacaggatcctatgtcgctgaagccaaagaggcatttttcagaaatcaaaatagttccgaaatttgagcattgcattatactaaagtattaccatctgaggacccaaaaaagttataaatctggggaaaaactcaaaatagatgtacatcagttcagctccaagcaaaggcaccgatcttactatcttactgtgtctcttgtatcatagggtccttaacactaatgatgtcttaaacaatctcttttaactcagtttttcccagtcattgattttgcaactcgggaaggttttgcatgcccaaaagatttggggagcagaggatgggggtgtcctttattaattatattaggattattgagtttcgacccaaactacaagcatgttgggccttatttaaatttaaagtgaattcctcagaccccttcttgggatggttcggggaactacgagtttggaactcttgttcacacaccgaggcgcctgccccagagtttggacactggcattccgggagagcaggccttgcgggagtctggacccgaagggcgagactccacagggccaaggaaagcggcctctgtcctccgttagtcttgggggagcagacgcaagaggaggcaagggcgccgcgagctccccggatgcactggtcccacaggccgtgcccgagtggagcactgcgaatggggccaagaaattttggcctttctcgccggacctggctgcctccgcgggcctctccgcctaccgcgctcccgccgcggcccgactcccgcgggtctccgcgccgaacccacctggctcctatcgcacgggacattcccgacccacccacgccgcgtcactgagcctctgtaccgatacccggcgcctccgccagcagggcctggacgcaccgcctcctttgacctcgggcttcccccgcgctccgctgcttggggcagactggccccgagagggagccaccatctcccctgctccagggtctccagggtccgaacccgtgttgggatctgggttaggattagggtttggagcttggagcctgcctgttaggacccccggccccggcgccgactggagctcgctggaggccacaggaccacggcggatggcctggctgcttcagggcgtaccatgcccgcaggcagatgtttattattaaaaactaccgacgttcatcaaccaggagacccgcaaggcctgcgcactgaatacggcccaaatcctgttcagtggtctttgaaagttaaaagaaagaaacctatcgcccacgtctatgctgaggaacagctttgaatacgagctaagacctgggagagggccaagtgggggtggtggggaacactgctggaggatgtggggctttggcaggggttttacgcaccctccagcacgagggtggggggtcccaggggacgctcaggactctttcagtctttgcggaaggtcccgtcatcacaagagcccgcgcgggaaggaaagttcctgccttggacatggtcagggccgagtcttcaaagtctccaactatccccacacaggcagcacctttgggctttactagtgggatttcttccagaagggggccacgacatggggagagagagctcctcattattttcaaggccaggcttttcctaaacccgattctggcttccaccttctaaatttaaccaatgaagaagctgcttcagccaaccctaaacaggagtgtcagatggggaatcctccctccacagtgccctggcctgcccgcctttgcggctcttttcccgctccgaagtcagcacctgccccgctccagagagggtcaacgaactgggactgattgtcgattatgccataccaaacccaggttgatttcgctccgcaggatccctccttccttcctcccaaaagtgtccccagataaagactggaattatagcaaaacgaataacgagagtccatcttggggaaggaagttactctatcctatgttattttacttcttatctgttctttcattaatttggtataaccctgtttctatgctgggtggataaaatggagggggccggcggaaatgcgctcagcgctaacgacagccacagagccacccttcttactgccccttgactgcggcacgtaagagcagaggcaagcgcttttccaagttggtatattcgagagagtgatacgcattaatcaaaagggaaagactatcccggatattttaatagtaacaggaacaaagatgactcgaaccccatcaaatgaaacgatattttcattcaattgatcgcaaagtgtcttcaattaataacttggcacttatttaaaaggtttaacagaattggaggcgacacattttgtactgacaacacgtcatgagataacatcttttgtttaaaataacttaatacactagaaaaaaatatgtcaaatataaataattttgttttcatggagaacaaatagttacaaagctcaaccgcataccaaagttcagttagaagagcttttcctctttcttgtaaattagaaggtaaaacaaaaacaaaaacaaaaccccacaaacttaggcttgctagcgaattgggatacagactggcttagtccaaggtatcccagtttaaatagctacatgaattgaaacaaacaaccaaaagaaaaaaaaaaacaaaaaagaaacaaacaaacaaaaaaaaaaggttacttgaatagatacacctttgtgagataaaatgcaaatgttgaaagtcagtccacacattatagtcaaaataaactttgttcgtgtgtatcaacatatcttacacaaacctagtgcctgtatctagctgggtgttatttaaggtgaatttgacgggatagagagggggaaataaaccactgtcttcaaataggacttcaggaaaccaacaagaaggaacacaagaaaaggggaatggtgggaactaatactgattgagcgcctactgtgtctggcacagcgaggcgctgtaccttcattatttcatttggtggtcttgttttctttttcctttccccacatattctgcccacctctgtcttcttaggacaatgagtgtaattttttccctttctgacttttttcttttgttccccaggatcaaagacagggcaaatatatatatatatatatatatatatatatatatatatatatggcaaatatatgatatatatatatggatatatatatatcaatttccagatacttttggtattgtttttcatagtgaagatgaaaatggagtgagtgcatgggagataagggggtgggaggagacacaccatcaatggaatacaagtaacatgcaaaccggaatttactgtcagcagtccagacagttttgccataataatttctcagagaaatcattgtctgtggcatttttttgtgttaatattatttttctctctcctcgttttaatattttctcttttcttgctcttccatacatggtgggtttaaactcaaagcatctgattcaacgtaaaaggaggcccgcctctctcatcaaatttctcgtgttaacgtgaacttcgcagaaaaaggtcagtttcaaaacctgtgaacttcccagctgcgcacttttttcatcttagttttttaaataagtatacctcttctttctgctttgccttcttagcgcatttttaaaaacacacatttaagttggtaactccccccagtctctcgagaatcgtctgggttgtttttccatatttttaaatgtataaaatactttaattttaaaatttgtttttgctccttggttctccaatttcagcttctgccaaatagcagttaagaaataagttcccttcctctttttctctcccgtttgtctttcgatttttttgtttgctcattttttcattgttaacaagatttttttttctatgcaagagtccatcgttgcagctttgcggtgagccaaactccgcggttccagcactcccctgtccagtctctctccagactcccccaaacccgctcctacaaaacccaattctaggccctcgagtaggaaaacgggcaggagccacggagcctgcgtgcctcgtgagatccctggtcctgcgtggagtctggctttccgagtccaagatgcgataggggacgagggatggtcagtgaggcgggaagagggccggctcccgaggtctcaaaggggtaacggagaagcagcggggcgcggagggcgtgcaggctgagtgccgcgggacaggcgcgacattggtgctggcgttggcgtcacagacccagggctgcggcgtgctttttggctttcagtctgagatcggcgatgctggagttcttgctggtggtcttggcggctgctgcggccgccactaccgaggcggcggaagccgaatccgcggccagcgtggcgagcggcagtccgaagggcggtgctgggaacatcatgtagggcgcgtgcgcggccaggtgcggatgcaggtggtggtgcgcgtgcgccacagcgctgtccagctgcagctgcgcctgaacctgaaaggacaagggcgtcacgttgcaatgactatcctagggtgacaacagaatagaaacagagcattaacggcgtccagcttggccagagagagagttgggttgtgtttgggcacggggagagggcatttggctgtgcatcttgttccgacagtgaccttctcagcctgttgctgaatctggggttccacatggatactccagtgtcccctgggtctccgaaactcgcttagggtaggcttatttccccggaccccgggaacccccttctgcaggaatgtggccgtctcccctgggaactgggctgaaatggtatattggaaagactgcgggtgaggacccttaccctcttctcttgatgctgccatgcatctcttaccccactaccaaaacaacggagtatcaacaagcaaactacgcaactttttaatgtcattcagggaagttactccatcttcaccacaataggcacaattgtgagtcggtacttctaacctttattgccataacaattacccagggatctcgttaaaattcagattctgattcgcaaggtctaggttggggcctgagattctgaatttctaacaatctcccagacggtgttgttgctgctggcccaaagattaccttttgagtagtaaaggtctccttttaaagtcacccctccctctttcttcagtcattctctcttgtttccaaagccaagcatcaggatgccagagtcctgtggcaccaagagagctaagatctccctaacaccgactctcaattcatggtcacacctatctgtctccccggtccaagtcactggagactgagagctaattcatgacatcacaggcatgccaagcaggggtcctggctgaggatagggaaggtcagacactggttgggaaaggatttcgccctcaggcttggaaagtggggagttcagagcactgggatttcccaggattaaatcattgctgcaggctgtccttttaaaatgtactcttaaaggtttctttatggctaagggattgcaaaggcagggcagccctgggaagaccaagacttctctctttaccagagatgaagctttgtttgcagaaacagatttaaaaacaaaagaacgaaaaaacaaaagtatgagctgggagtacttgtgtttatttttcttctgtcagagttatttaatgtgactaagaggtagaaaatacctagaaaagtatctagagggttgccttagaaataccttaggactaacctctgtattggatttgacaaaatcttaatcaaaaggcttttccttcctctctctctaagggcaatctttagtgtatttttaaaggaccagttactgcccccaggccccttcagggattcccatgaggacagaagggactaggcattcaggcctttaataccgtataggtttttaaagggtagtgggtccactatatcatctcaaaatgattctccaactatgcagacattgacatctgggctcagagacaggtgatgttcaacagttcaagcaaacattcaggtattttcatatttaaaaacagcttgaaactaggctgtacttgcctgctgaaatggcatccttaaagcacctacgttgacataaggtgcgactctacaagcttcaaactggctggcggcccctatgagaacacctgtaaaaagtacaagagaaaaataatgtgaggttaacgtttgtagcatttttcagggttccaaagggtacaagacagaacgaattcctttgaaaatggactattatctttctaaactgcatccaaaatttaaataaatgtaacttactcccaaactttaggactccattaacagcctttgaagattattaagtcaagaactattgtcatttttgaggttcctttttttctgtcattgtaatagtaatattcactacttctctctttgctcagactatcaaatgttccttgtataagaagcatacctttatggagttgattttcttgttttctacatttagctcttcgattttgaaaccaaacctataggttggagggggaaaaaaaataaaacctagatgttatgactaaaaatttttttaaattacaaaagtacaaagagaaaagagtcgtg

SEQ ID NO: 120 - DNA, 4313 bp, Homo Sapiens
gggtttgattttttgagactcggggaggacccctggcagatgtgtgcctagccagaacatttggtaaggactcctccaatgaagaaaaagtggaggaatccagccccagcgagaagaggcttccccaccctgccctagacacaccggacagagggcacactctgaccagagccacgtccagtggccaggaggccagcccagcacctcctcccccaccattcccgtcctgggtgggggggtaattttcctgggagcagctgtgggaactgtcgtttctcatcccagcccagccagcactctgaagcctgcaggggaaggacagcacgtgggatggacactggggaaggagcttcgcaaggccagggtgcaaccttcaggccccaggtggcctggcaggccacgctgcctcggagatgcttgccagactccccaagttcactcagggcctggcagcaacctgctggctgcctctgcgggggtctgggttgctgagcacggtgcagctgcccagggccaatcagccctagggtgtccgtgccaggctgcggcctccccgcctcccccgcactgagggtactcatggcgtgcaaatgctcccgcacccccagagctgccctatcggatgtttccaggaattcacacatttccataaaaatgcattttaaatgatggacaggcgagcctggggtaacaacgggtgtttggtgggtagacaagagcaaatgggaaggagcccgagggaggagggggaagagaagaggaaacagaacttccagttggacattctgacaacagctggaaggaaagtctagaaaagatgaagagagaggaggggagaaaccaactggggctcccacccttgccgttggattcctaattctcgtttcaaatgggccctgctctccggcaaaattagtttaaaggattttaaaacaaagaaaacgagatgaccggtctgggagctcctcaatcagagtagagaagttagaggggggcgggcgacttggttttgaagtcttagctgaacagtcacccctcctctccttggcaaaaaggattcctttagaacctccgaggctcctggatttctcccttcgcaaatggagccgcatactgcattcccccgctctttcggatcgctaagcatgtttcatgagggtcgctgtccccgggtggaatgcggccgtatgcacgcgcctccctgcacacgcacacacacgcacacttacaataagtgtctgcaggaggagtgtcctgcgcgccagctctgcgtttaagacaggaagctgccgggttaccgagtcaaatgggagtgacactattcctctccatcagcaaggaaagcggaccacaaaagtccctttgtatctcggcagctcatttaatattatttatgcattttgtgcaaggaattgtgggatttcgccccacggtaaacaatatggaaatcttaaaaatagcgatcttcctgtgcgtgtccacctacgcgccccggggtgacctggcggggctgtcgccgggtgactcacacccctgaaccgcgaagcgacagggaaagcgcgggcgagcgcaggagacgcggtcgggggtctctccgggttcctgggctcccgcacccggagcgggggacgcggccgctttaaggggaggaggggcggcgggctgctcctgtcacccagcggcggccggagcgtcacgtgggcgcgcggcgccgcggccattggcccgaggcacgtgtccaggagaccggcctgcgacgtcactcgagggggctctgttaaaaataagaacaaaaatccagagtgaaagtgtctcaggttgcgccgagtggcctggaaatttccgagcccgcgcggaggccgaggcggcgagggcggcggacggccggggagcgcgggcggcccagcccggcccggccgggccctggcctcgcgtctctcacccatgcgactcgggccgcggagctctgcggggctcggcgggggcgcggccgcacgccggtggggcgccccggcccgcagcggggcggcggccgcgaggagggggcctccatgtgcgtgcgggcggtggcgggcgcgctgaccgcgggcgcccggcaccctcgagggccggctagggcgtgcgggcggggacggccgggcggcggcggcggccggagccggcccgggcgggcgtgagcgccggggaacgcgctgcctgcatgcgcgcagctctcgccccgggcggcccaggcggcggcgccggagcccgaggcggccggacgcggagaggagcggggagcccgggaggcggcccgcgtccccgccggaccactgcgactgtctagaccccggctgcgcggcgaagtcgaggacttggctctgttgaatctctcatcgtctgggcgagcggggcggctcgtggtgtttctaacccagttcgtggattcaaaggtggctccgcgccgagcgcggccggcgacttgtaggacctcagccctggccgcggccgccgcgcacgccctcggaagactcggcggggtgggggcgcgggggtctccgtgtgcgccgcgggagggccgaaggctgatttggaagggcgtccccggagaaccagtgtgggatttactgtgaacagcatggaggagaatgaccccaagcctggcgaagcagcggcggcggtggagggacagcggcagccggaatccagccccggcggcggctcgggcggcggcggcggtagcagcccgggcgaagcggacaccgggcgccggcgggctctgatgctgcccgcggtcctgcaggcgcccggcaaccaccagcacccgcaccgcatcaccaacttcttcatcgacaacatcctgcggcccgagttcggccggcgaaaggacgcggggacctgctgtgcgggcgcgggaggaggaaggggcggcggagccggcggcgaaggcggcgcgagcggtgcggagggaggcggcggcgcgggcggctcggagcagctcttgggctcgggctcccgagagccccggcagaacccgccatgtgcgcccggcgcgggcgggccgctcccagccgccggcagcgactctccgggtgacggggaaggcggctccaagacgctctcgctgcacggtggcgccaagaaaggcggcgaccccggcggccccctggacgggtcgctcaaggcccgcggcttgggcggcggcgacctgtcggtgagctcggactcggacagctcgcaagccggcgccaacctgggcgcgcagcccatgctctggccggcgtgggtctactgtacgcgctactcggaccggccttcttcaggtgagcccgcggggaccacgcgtcccggctcgccgcggggaggcccgcggagctggggggcggtgctggcgcgggaacttaccgggaggaaaacatctcgaacctcccccgcgcacacgcacaaagactcacgcgacattgtgtgaagctgacgccggcccgggcagcggccaggagtccagcggcaggactgattcgctagggggtacagacttcttaggaccgcagaagggaccttctttctttctctgtctctctctctccttcctctctccctgtctcccctctctgtcttccaccccgccttggcgcatctcttcccagcccctagcccatgtctcccccactgtagttttttttggtgggaacgtggtggctggaagatgggcccggaagtgcacactctcatccccttccctacgatcttccaactcaggccaggccggggacgcatgccccagcccaccccagacttgtcctaccatccggttatcccggctgtgctcggggaagaaaaggcgaggccctttgccgctctgccttctgcccctcgggcctgcgctgaccggtgggactcaggaggatgcacacagggaaggaggaaaataaaggcgccctttccccttggctccactttgtttgccagcgccagcccgcagtggtggggctcagcccccttcctgcacacagcgaggacaagggaggcagccgtccctcccggcacctgccatccccaaatagaaaggaccttctctcagggtttcctgggggctgctgatgggaaagaggcagcattcgcaggggccctgcagagatgctggatatattttttcatagatctgcgattttaaaaaactaagtccatgtccttgtagaaatcatcaactgcattccatgcgggtctgcggctgggaaccgccattagaagtggactgtttgaccccgagctggcagcggatccccgctgcccccaaaccctcaactattttgcgggggtcatttgcccagatc

SEQ ID NO: 121 - DNA, 16197 bp, Homo Sapiens
ccctgcaggtggagggggaaagggcttgggggctggtggaggacgcaggagtatgggggagctgtggaaaagacgtggaggcagagccagcaggccttgctaagggacaggaggtggctctagagagaaaatgagggatcagggatgtctcctggggggtggccagctgggtgactgggagaaactgggaaggcgcagatcagggcagcaggggtagcgggatcgggggtgctctgaagtgaacacgtgaaattgaaggtgctcgtcagccttccagtggaggcatccaggaggcagctggaactggaaggaaatggtgacagtcgtcagcaccgtagaggtggcggtggtggtggttacagctggacccctctgggctggtgggaagtgtggaggtgaaggagcagggagcagggggaggtggagaaggaaacctcaggcttacattttcaccctattcttggctgccatattttcaggaagtccctcttgaggctgggacagagggtggggacagttcagtctccctgagagagtttattctcggaggcctgcggtgggagccagggcgcggcggagagggtttcccacctcttccccagcaagcgggagggaggcgccgggctgaggctgcgctgagctcgagctcgccgcccgggtggacccgccctgttcaagcgcggaggggcggaggcctggttgggttgtagcgtggtgcggagcaggacgccgcctcgtgccatggtcactggagacgcacgcccatcttccctcccgggcccgtcgatcctgccatcttccgctcccggccgctcgtgggtgttcgtcatttagaccttccccgtgcttcatgggacgcaagccctcccccagagttcggttttgcaaaagaggtctggagccctcgctacagatcccctccctgggccacggaggatgagaagggtcaccgagccgagccgtaatcctgcgtaacccctgacctctctccttccctgcccccacggcaccccatcgtcccctccccgtctccgaggtcctccagaaaacagcgcagaattgtgcagatgtttaggagatgtgaagatgctggagatgcttaggaggcgacggttacgcgaggagaattgcttccaggtgcgcttctggaacgcacggagatcccccggcggggaaggggccggggctcgcgtcacttagtgtctgctcaccgatttccctctgaagagggggcccagggcctctgctgagggagcggggaggcggtgcgggcccctcccgggcacacatgggtgtccgctccttcctccccctcccctcccctcgcacggagagcggagagcggagagcggagagcgacagggaggcagccgaagacttgaattttgaaaggggagctggcggcgaatggtgaatgagacagctacttaggaagcgagtccagccagcccgggaggcggtggagacccacgcccggaagtaaccggattaggtctcagaatgtgatcgccccccgggtcccgggggagacgccaaggacgcgcaagcggagggcgcggagacaactgggagtcagagtctccatcacttgggctgggaacgcctctgggcgttccgacggggtggcggtgggggtcgggggaggcccttgagaaccgtgcggcccggggagagcccacccattgctgagccccgacacaggctttgaagttgctgcagtggctcagcccctcccccgtccggccctgcgcagcgcggtgccgcagagtccaggccgtgcctccgtttcgtcgctcagagcttattgcggcggctcattggaccacgtcggtggggcgatcgcagcctctgatctgtgagctgcaaagagctccgaggttcattcacaaatctgcgcccccagccgtccctccacgcacccgagccacgtcccgggacccggagagcccggggcgttgggcgctgcggaggaggcccggcttctgtcgctcccttcacctcccagcccgcgagggacttgggggaagggggagcaagctttcgctccggaagaaacgttcggaaccaaggagtctgactcctggatccgggtgcctgttggatccaggctcccactcccgggccctccggtcgaaccaagggtcccgacagggcccgaggcacccgcattcctaggagacaggagctcggccagggcgcatcaccgggtcctgctccgagccagaggatgtagtgtagacacccacccccacaccgcccctccacagagctcctctccccttggggcgtcgctgggcacagggcaggtcgctaggaatccccagtaaaaccacgctcgctcagaggttcgcggcttcctcagagggcgctggggaaagagaggggacctgatttcttcgaccctcggaggaaaagtgctcggggcctcctagggacacagccctggaagctcacctcatcttagcttaggccgcggcgaggtggggaggagagttaggagagggggagaggggctctgcgccctgcagaggcctttaattctggaggaaaaagactgggacacacccaagcgagccaaggcccgagccccacgcacctccacccacccggggcggcgcacagccagctcctgccgggcgtgagcactcgatcaagggagcaagtggaatgaaaatccagctgggggggtccccatcgacacaactgtcccgcagtcgagcttctggattcctgggagatgtggagagcctggggccggctcccgctccgcagagcagactggactgccctaggtgcctggaatgcgcctgcaccctgtccctcggacccgcgggagacccgtgttccgcaagtcccccttctcaccctagtctgcccctacctacatcccgccggcgagtgtgccaccgcgaggcgcctccttccccgggaagggagctcccttccgcgcagacccgcattgcccttcttttcgctcggttttgttttccaggggtagtttctgcagaaaggagattctcctccgggccgaagggctaccagcctgcagtcagttcagccccggaccctgggagatgctcaccactctgcggatcttgatccgaaatcctttctggccgcccactgcggagagtgtcctcgtagagaggttttcaatcgaaggagcctgggctccacattttgtcttcaagcctgagctttcagggctgctttgcacgaggtgcagatgaacttgtgtctgcaaacaagacagaaaaccctaagtgccgcccgaccttcctcttttggggaacccgcactttgtcctgggagcgtgcccagcgccttagtaccaaactttctggccggggctggcagagctcagagtcccgcttccccctaggcgcggccccctaacatctgtaacccaaatgttgcgccgcggccaaaattagccctggcagtgcgaacagagaactaaaagcaggcagtgaatgagaacagctcgcatttctccttcctggtagacggggaggtgtaaatcccgaggaattctagggcattcgctccaaacgtgggaaatcttcgcgcgtatcccgtttcttcctcccagcctgtgttaatgctccaaatggtgtcgagttgctcaactttgccgtcatcacagaggctgttgtgtcttaggggattaactgatgtgagacacacaaaaccctgcaactccataacataaactatagcacagcctttctggagagggctggaatatttgagtgagtttccgagaggaaaagaggagttttttagaggagaaacagagcacttctataatgtgccctaactgagaaatcttgttctactgagcttttctttaagtggaaccagaagtgctgggatgagagggaaaggatgggagtgcgtccaaaggtggacagcaggtccccatccctggtgggagtgagactggacggcatcccccggaaaggtggtttgggccttggacaaggctagaggcaggagtccatgatgcagagatgacacagtgcccctccgcgtgtgagtccacgaaggtcactactgaggctttgtgcttgtaaaaggtcgccacgcttcacacaagcttctatactcaacacagggattgattgggtacagggatccccccataccatacatgtaagcatgtatgtcaattaaagatgctcgtgctaaagaaacggccaactttgttgaactcagaggaactgatcaatcatttaactaagtagaggaaatgtttgaatttaattcgcaatttagttgcctttttatataaaactatatatctttatttatatttgatgaatgaaaaaagaaatcagttcatgactttaacttaaacatatgtttttaaaaatatatttcccccagcttagccagtatataaactaattgagttctcctggttaagcatgattcagttgtgatatttaagagcgggagtggttgtttagatattttcttcctcacgtgaaacctagactaatgagttatcatctaacaagctgtaggtagtttggctgggctggatccagatggtttgagttaaatctagattgtacttgcctaaaattctgtaaacctctagctacgcaaatcctatttccaaaaatgctgggaagtcactgtataagagtttaagctacactagcctctctgtgattacttgtagcctttggggaaagaatagaagaaaagaaaatgtcagcctctgtgaggtggggctggtgtttcaggggttccttttgaacatcttgttttctttccaaaggtcaaaaggaaggcagtggatacatactagaatttcttccatctgtgaatggtcgcaaggctggagaaggtggctagtgtacttcaaggctcattatccttttctgtgttttccttcctgttttggtaggcttagccagctcaagccttgggtgccattcttcaaattcctttgccaaactaattttacttatttgactggattatttgagaggtgccactttcttctgggttgctgtgattttgagggggcattttcataagagtccaggcattaggtggtgaaacagtctgtgctcccaaacctgcccctcccagggctcccgggagactccagagtgcaggtctgtctggggagtctcaggggtgggccttgagtggaagtgggcccaccttccacaggagtccaaattttataggaataagaacagcagtaaaacaggacaagagagcaggcagggagctgccaaggaaaggcgattcttgggaaggcaggtcacccagaataaggctcccctggcgctggagagccggaagggggagcgggcacagaggacctggtttaggtgtgggggttactagcacaagtagagccatccttcagattctccttcagaagcagctgctttccagagaaaccaggtgagggacagtttctgcatctttacacgccagctctggagatctgcccacctgcccccagccgcccccctccccgggcgagcctgggctaagtatcaagtcaggacagaagggcggtccccagtcggctcctggcccactctgcttccccaacacctagggagcttgggctcagcacaggcgcttctccagcgatcggggcagaaccaggacgtgcaatgcgactgcccccccctccccgctccccggcagagcttctgtccgcgccaacccacccaccaggctctgcccgcgccacgcgcgcccctggcaggcctggggcggggaaaggcgaagcgctgggcacgcgagggcctgtgcaccccagttcctacgacgctcctggcccttttcaggcccgccgctgccgcatttaaccccctccttccgggggttattctgaagaagtctcagaccctagacccagcctcccagaccccgtccccgagctcgcccggtgggcctgtaggccggtcctccttcgcccagaggagagcgcagacacgcaatgtccgcccgttggccccgcccgccccacccctgctccccgcgccccttcgtttcggcctttgtctacaggccgggtcggaacgtcagccccaggagccgacggtggctctctgctcgccccggggaaggtgttgctctcctatcggccccaattccccgcccggcgcctggggcttggctgcggggctcggctcccagccgagggcgcagggctggccaggcctgctttggctgaggtggagatctcgctctcagggattgttgggcgtctctgccccgcgagtaacgagaccgccgcgagcgaacggctttcattgagtccatttttccaagtgtcaccacgtcaagctagagaagcgaggcgagtggaggggacgcagaggggccggaaaagtcacccttctctggcctcgttttcagataaaaacgggagcctggctcggcatccgggcgcccggtgtctccggggcgcttcactgaggttttgtttgcaaaactagcgtccgtgtcctgaagcgcacggcgtctggaagctgctttcctgctcgccctctccgaggcccctctttgtgcagcgagcctgagaaatatggaggaccgtcctccgcaagcgggtggtcgcgggcgctctccgattcctgggtgaagctagagggaaaacggggttcccgggtcagtgccccactttccatcccgggagaaactaatgtccggagagggctcgtctgatccgcacagaaaggccgaccttgagggcggcggtcgttcgggggagaaagcggaggctctgggctcgcgggagcgcggcagccggggctggcatcgcagaggagagacacgccactgccccgcatccccagaaagcgcgaggcgccgtcccagctggggcaggcggccgaggccggtcctcatgcgcgcttctcgaagcttcctgaaacaccttgcggagttccgtgtgtatagaactcagcaccgcccagcccctgggcagctcaactttctgcagccccatcccagcttccccggccctttgaacggtgacccctcttaccgctttcccagagttgtttcgtgtttgggtccactctggggggcccggtaccctctagttatctctctcttcatttatttctctttctcctattcctccctccacctctcaccttcctcctttccaggagagcgacccacgaattcctcttcctccagccaaccccagggcccagcccgcagaccctgcgagggcaggtctctgcccaccggcccgccaggcgccctggaggtgacgctctgcttcccagagtctctgttgcagccacgaattggggtctgggtcgcaggaaagcacagggctgaagcccagcgtcttggggccatttatactgaggcagtcagaggcaaagagtcccaagaattcagaaaatacttctcaggaagccgcctaattggctttcatgggacaggtggagccattaacctgggatggttttgcaggaaccaaagagctcagggcccctcctccccccaatatcatgttcaggagacccagagtcgttggaccctccctttcctgactggtgatcatcagagtttccagagttgcagaaaattctccccccaaaaaaccaagtaagcgtcaataagacttcccacaaactctcaccagccctattttcccggggggcaggtagactgtggggtttgattttttgagactcggggaggacccctggcagatgtgtgcctagccagaacatttggtaaggactcctccaatgaagaaaaagtggaggaatccagccccagcgagaagaggcttccccaccctgccctagacacaccggacagagggcacactctgaccagagccacgtccagtggccaggaggccagcccagcacctcctcccccaccattcccgtcctgggtgggggggtaattttcctgggagcagctgtgggaactgtcgtttctcatcccagcccagccagcactctgaagcctgcaggggaaggacagcacgtgggatggacactggggaaggagcttcgcaaggccagggtgcaaccttcaggccccaggtggcctggcaggccacgctgcctcggagatgcttgccagactccccaagttcactcagggcctggcagcaacctgctggctgcctctgcgggggtctgggttgctgagcacggtgcagctgcccagggccaatcagccctagggtgtccgtgccaggctgcggcctccccgcctcccccgcactgagggtactcatggcgtgcaaatgctcccgcacccccagagctgccctatcggatgtttccaggaattcacacatttccataaaaatgcattttaaatgatggacaggcgagcctggggtaacaacgggtgtttggtgggtagacaagagcaaatgggaaggagcccgagggaggagggggaagagaagaggaaacagaacttccagttggacattctgacaacagctggaaggaaagtctagaaaagatgaagagagaggaggggagaaaccaactggggctcccacccttgccgttggattcctaattctcgtttcaaatgggccctgctctccggcaaaattagtttaaaggattttaaaacaaagaaaacgagatgaccggtctgggagctcctcaatcagagtagagaagttagaggggggcgggcgacttggttttgaagtcttagctgaacagtcacccctcctctccttggcaaaaaggattcctttagaacctccgaggctcctggatttctcccttcgcaaatggagccgcatactgcattcccccgctctttcggatcgctaagcatgtttcatgagggtcgctgtccccgggtggaatgcggccgtatgcacgcgcctccctgcacacgcacacacacgcacacttacaataagtgtctgcaggaggagtgtcctgcgcgccagctctgcgtttaagacaggaagctgccgggttaccgagtcaaatgggagtgacactattcctctccatcagcaaggaaagcggaccacaaaagtccctttgtatctcggcagctcatttaatattatttatgcattttgtgcaaggaattgtgggatttcgccccacggtaaacaatatggaaatcttaaaaatagcgatcttcctgtgcgtgtccacctacgcgccccggggtgacctggcggggctgtcgccgggtgactcacacccctgaaccgcgaagcgacagggaaagcgcgggcgagcgcaggagacgcggtcgggggtctctccgggttcctgggctcccgcacccggagcgggggacgcggccgctttaaggggaggaggggcggcgggctgctcctgtcacccagcggcggccggagcgtcacgtgggcgcgcggcgccgcggccattggcccgaggcacgtgtccaggagaccggcctgcgacgtcactcgagggggctctgttaaaaataagaacaaaaatccagagtgaaagtgtctcaggttgcgccgagtggcctggaaatttccgagcccgcgcggaggccgaggcggcgagggcggcggacggccggggagcgcgggcggcccagcccggcccggccgggccctggcctcgcgtctctcacccatgcgactcgggccgcggagctctgcggggctcggcgggggcgcggccgcacgccggtggggcgccccggcccgcagcggggcggcggccgcgaggagggggcctccatgtgcgtgcgggcggtggcgggcgcgctgaccgcgggcgcccggcaccctcgagggccggctagggcgtgcgggcggggacggccgggcggcggcggcggccggagccggcccgggcgggcgtgagcgccggggaacgcgctgcctgcatgcgcgcagctctcgccccgggcggcccaggcggcggcgccggagcccgaggcggccggacgcggagaggagcggggagcccgggaggcggcccgcgtccccgccggaccactgcgactgtctagaccccggctgcgcggcgaagtcgaggacttggctctgttgaatctctcatcgtctgggcgagcggggcggctcgtggtgtttctaacccagttcgtggattcaaaggtggctccgcgccgagcgcggccggcgacttgtaggacctcagccctggccgcggccgccgcgcacgccctcggaagactcggcggggtgggggcgcgggggtctccgtgtgcgccgcgggagggccgaaggctgatttggaagggcgtccccggagaaccagtgtgggatttactgtgaacagcatggaggagaatgaccccaagcctggcgaagcagcggcggcggtggagggacagcggcagccggaatccagccccggcggcggctcgggcggcggcggcggtagcagcccgggcgaagcggacaccgggcgccggcgggctctgatgctgcccgcggtcctgcaggcgcccggcaaccaccagcacccgcaccgcatcaccaacttcttcatcgacaacatcctgcggcccgagttcggccggcgaaaggacgcggggacctgctgtgcgggcgcgggaggaggaaggggcggcggagccggcggcgaaggcggcgcgagcggtgcggagggaggcggcggcgcgggcggctcggagcagctcttgggctcgggctcccgagagccccggcagaacccgccatgtgcgcccggcgcgggcgggccgctcccagccgccggcagcgactctccgggtgacggggaaggcggctccaagacgctctcgctgcacggtggcgccaagaaaggcggcgaccccggcggccccctggacgggtcgctcaaggcccgcggcttgggcggcggcgacctgtcggtgagctcggactcggacagctcgcaagccggcgccaacctgggcgcgcagcccatgctctggccggcgtgggtctactgtacgcgctactcggaccggccttcttcaggtgagcccgcggggaccacgcgtcccggctcgccgcggggaggcccgcggagctggggggcggtgctggcgcgggaacttaccgggaggaaaacatctcgaacctcccccgcgcacacgcacaaagactcacgcgacattgtgtgaagctgacgccggcccgggcagcggccaggagtccagcggcaggactgattcgctagggggtacagacttcttaggaccgcagaagggaccttctttctttctctgtctctctctctccttcctctctccctgtctcccctctctgtcttccaccccgccttggcgcatctcttcccagcccctagcccatgtctcccccactgtagttttttttggtgggaacgtggtggctggaagatgggcccggaagtgcacactctcatccccttccctacgatcttccaactcaggccaggccggggacgcatgccccagcccaccccagacttgtcctaccatccggttatcccggctgtgctcggggaagaaaaggcgaggccctttgccgctctgccttctgcccctcgggcctgcgctgaccggtgggactcaggaggatgcacacagggaaggaggaaaataaaggcgccctttccccttggctccactttgtttgccagcgccagcccgcagtggtggggctcagcccccttcctgcacacagcgaggacaagggaggcagccgtccctcccggcacctgccatccccaaatagaaaggaccttctctcagggtttcctgggggctgctgatgggaaagaggcagcattcgcaggggccctgcagagatgctggatatattttttcatagatctgcgattttaaaaaactaagtccatgtccttgtagaaatcatcaactgcattccatgcgggtctgcggctgggaaccgccattagaagtggactgtttgaccccgagctggcagcggatccccgctgcccccaaaccctcaactattttgcgggggtcatttgcccagatcacagcaggagtgagccaacccttgggccgccatcccgcagaactatgcgtgcatatttctgatgaaattcagatttctcagctagatctgaaatttgctccattgttctcgtcttcctcctttgttaatatttaattaacatacaggctcacaatgccgggcgaggagactcggccgggctttgtgcggcgcgggagttcgctgagccagcccccaacggcccgggagctgggcagcaccgcccggcccggcctggcccggcccagctcagcccagcccaagtcgcctatcttcatgggctttaaaatatccctgcaagataatgtttctgttctttggtttctccgaaagaaaggggagagagagttttcttggggaggtttgattctgtttctgagactcctaagtatttgtcttttgaaagaaaatcaagaaaaaaacctaaaaattattattttagggaaatttattgccataaaatggtgtccttttgcgggctgcttcatgagtgcattaacaagagccccaggaccagaagagtttgggggtagagttctggggaagggagtggttggaaacccagacagagatgggctctgggagcaggaggctggggcctctcctggagccttgtgccccatcccccaccaccgttccggagggccaaccccatctccaaatctgcacctacccctaccaaagccaggcccactggcctggagccctgggcgtgagcaagacaggcactgagtgtgtacgtgtgcatggggtgggtgcccaagtatagggtgtgtgctctcatgggtggtgagcctgcctatgggttgctttaaaagctgcccttggtgctcctgaggtggtgcccacagatcctctttctccaggcctgtctcctggagagagcacaagactcacttggccatgagggagtgcttggcattcaccctgggcctccagttcgtcccccacctcttgctgggcacagccccagcaccctagttgactctcctgacctgggcagggtgcagtcccagggcctccaaggagatccacattcctcttctcctcagtgtgcccggcagctctccggccctgaagggtggggggcccccagccttctccagccacagggacctgtgatgaagctggggccagatgctccctaaagccgattcatacaccgcacaaattgaaacccagaggcgaggtcaccactccctgccagtggccttgcccccttcttcccccacagggaacgccagggggttgagcctcttatcaccaaaaagaaactgatgacacttccctccttctgctctcctccctctgccctttccccatggatagcaggtcctagaagccttacagcgaccctgtccaaaacctggggcaggtccacagggagaaggccaggtcaggttcataagtctgaatcccagttgggaggcacagtggggagggtcagaagtggacctggacaaggtcagctgggctaccctgctgcccacagtgaagcagtcccatgtctggggaaagggtggtgcagtcaacacccttgtagagccaggtcccctctcctggacaggaaacctgggagatttccagtgggtgaaggactcacccactgtgagtagctcagtgcccctccccaccaaggagggaagtacatgcactgactcttccttaaaggaatgaacttgggtccacagagcccttggctgggagtcatagaggagcttgggtggaggcagacactctgggcccctcctgtcctcagggcccacctgcccctgattcccacagcccttggcaccctgtggggtatccccatgagggtccccatcatagccctcagggcgcctcctgcttctgtgaccgccctgcagcctttcccagtcttctctcctcccctctctctcagcacctaccgccatccctgttcctgaacagagagcctcagaaaggactaggaaaaaccaggccagaaagtgtggggagttttgcttacatccaggagttttacttttatctagagacccctcatttgtggtcagcctgcccactaggcctgccccatagtcccacttacatcacacgcagtcctccctcaccaagtggtggaggtccgcgttgagcccatgcccagtccgaagtctagccccacatctggcggttcagcctcgagtggccttgggcgagtcacttccctcttggggccccagaatccttacccggtgcctattgggtggcacacctctgggtaacctgacttctctctgtccaccgtatctacccaggtcccaggtctcgaaaaccaaagaagaagaacccgaacaaagaggacaagcggccgcgcacggcctttaccgccgagcagctgcagaggctcaaggccgagttccagaccaacaggtacctgacggagcagcggcgccagagcctggcgcaggagctgagcctcaacgagtcacagatcaagatttggttccagaacaagcgcgccaagatcaagaaggccacgggcaacaagaacacgctggccgtgcacctcatggcacagggcttgtacaaccactccaccacagccaaggagggcaagtcggacagcgagtagggcggggggcatggaggccaggtctcagtccgcgctaaacaatgcaataatttaaaatcataaagggccagtgtataaagattataccagcattaatagtgaaaatattgtgtattagctaaggttctgaaatattctatgtatatatcatttacaggtggtataaaatccaaaatatctgactataaaatatttttttgagttttttgtgtttatgagattatgctaattttatgggtttttttcttttttgcgaagggggctgcttagggtttcacctttttttaatcccctaagctccattatatgacattggacacttttttattattccaaaagaagaaaaaattaaaacaacttgctgaagtccaaagattttttattgctgcatttcacacaactgtgaaccgaataaatagctcctatttggtctatgacttctgccactttgtttgtgttggcttggtgaggacagcaggaggggcccacacctcaagcctggaccagccacctcaaggccttggggagcttaggggacctggtgggagagaggggacttccagggtccttgggccagttctgggatttggccctgggaagcagcccagcgtaccccaggcctgctctgggaagtcggctccatgctcaccagcagccgcccaggcccgcagcctcacccggctccctctcctcaccctcctgcacctaactccctcctccttctcctttttcctcctcttcctccttcctccttcctcctgctcctcctttcttcttctttttcttctcctcctcctccttccttcctcctcctccttctctttcctcctcctcctcaccaagggcccaaccgtgtgcatacatcgtctgcgtctgtggtctgtgtcgctgtccccagtcccaccgcagtcctgccgcaggcctaaccctcctgccctgggcactgcctccatgcagaagcgcttcgaggttctggggctaaaggcctggggtgtgtggcctaaagcccaagagcggtggggcgaccctccttttggcttggccccaggaatttcctgtgactccaccagccatcatgggtgccagccagggtcccagaaatgaggccatggctcactgtttctgggcgggcagaaggctctgtagagggagatggcatcatctatcttcctttcctttttcttttcttccctatttttttctttttttcctttatttttttcttttcttggagtggctgcttctgctatagagaacattcttccaagataaatatgtgtgtttacacatatgtctgcatgcatgtgaacacacacacacacacacacacaccaggcgtgtttgagtccacagttctgaaacatgtggctaccttgtctttcaaaagaactcagaatcctccaggatctagaagaaggaagaaagtgtgtaaataatcatttcttatcatcactttttgtcttttcttgttttttaaaatatacattttatttttgaaggtgtggtacagtgtaaattaaatatattcaatatatttcccaccaagtacctatatatgtatataaacaaacacattatctatatataacgccac

SEQ ID NO: 122 - DNA, 2609 bp, Homo Sapiens
cgtagattagagatgactatagattttccccagcgcggatcaaagggactgaattgaacgttttagcttaatgatccaacccctgtcacacccacagggacgcgaattccgattttataagcaggtgtgcacgtgcactcagatactcacacaaagccgcgtggagggacgaaaagatcaaccacccgatcgacgaggataggtttgatcttttcgattacctcagtgtgccagtgtatattcccggctgggcctagcgccctaagaaacttcggaactttagctgttaatttttgttttcttactatgacttcccaaagacattctatctgcctaccggggcgaagagaaatgggaccaggcgtcagggcggtgggaccctgtccagggtcctgactccgcgccagggctccagaccagtcggcctccgaaggccctttcacccaccccacacaagaggaaacaaagacttctcagctcaaggcctcagggctgcctcctgactccggtcagtttgcaggaagaggaaacaacaaaacaaaggaaccgccaatccgccgggtattatatccctcagctccaacctccgacttcggaccgccagggtcaccttctctacgctgaccccgcttttcttaaatgaaaacacgccaacaaaagcatacttcggatacaaaatccaagtacgcatcttttttggggaggttagagctgaggtgtacttcggaagatgagaattttgttttcatgaattgggtaacacccaggcattgttaggtaccccgacagaccctctagatatccttctcttcctccttcacactttcttcctatcaaaatagttattgttttgaaattcactagaacaacgacgttctaaaaacaaaggcgcagcaagcatccctttcttcgctgccgcgggctgaaccacggacgctcgcgggtcgcccagccccgacggcccgcagggggcgcgcgccgcagccgcagcacagcccggctacccccagaaagggagccgaatggagggaagcagggagcgcggagggctcgaggcttgcagataaggagaggcgcatcctgggatttgggtcctctgctgctacaacacaaccgtgctattgttggcactgtccgacccaagtgtcggtggtaagcggcgatgtcggggctgggtctctagcaaccgctgtgccctgggtcaggctggtcgccccagctaccgggatccctctccggatgcttccagggcgataggtgctgcacccattgacgggatagccgcatacctccgaacaggtagtggagttcgtctctggcaggcatcctagctgcgctgacaccaaggtcgccacacaatagccatcagccccccttaagccccagaagtaggtttcccctgccccagccatagcggttccagtcgtcgccacgagcccacttcttatccccaagcgcacctccctctcctcacccgggtttatgcccgttacacagagagaactacacagggggaactatggtcctacaccctcgaggggacagacaccggccgtgagacaggcaccacgcagagccttctggtgactgtccgcaggagcgagaccttttttggttttgcagtcggctaggtgtgtgtgtgtgagggtccccagttgactaccgggatgcactgccacttttcggcctggcgggctctgggactccttggtctccgtaggaggccatcctaggccttcggaggaggcgctcccagctggcggcgcccctcgccccgggctcagaggcggacacggtcggtcgcgccctgctggccctttgttcgcgccgcagcgggctgggagcagctgcgcgacaccagacccacagcgccaagacgcgaagcgcgaggaaaccgctgcgcttgactccttctcccccaactcttggacccaggaacgcttccagctcctgcgtcccacacgcccagtcctggcttctctcccggcccagaagtcttcaaggattgaagggctctgcctagggccccgcactcctgcctgactcccatggcccagaaaagcagggggacatttgaaatgtcaccccgggataaatattaacaaaaaagcaaatggacttgtgcaggggccagttatcaatcaaccaggccgcaaggccactcagggcaaacacagcccaggttgggctgggcgagactttctcatggccgccccccgaccgaacccctccccccttggctcaggtccttcttaggtcgttctggggcaaacaccggacgggaagggggcgccgccaactcccccgcggggtttggaggtttcctcgcctccaagtcccgcagggcagggtcggagtgcccaacacccacccccgcccgaacctcgggcctgcgcgccgccttcccctgggtccgcggtgctgcgcttgctgttgggtgtgtgtcgctgtctctttccgagccggcagctcctgctgtgtggccgaagccctctggaatctttaattggaaactaatcttggtcttgatagacgcccacgtcagaggcgcgccacccacccacaccccccgcctcatcccggaggagacgcggcgagaaccctgtcgc

SEQ ID NO: 123 - DNA, 11667 bp, Homo Sapiens
cgggacccgtgggcgccaatcaatgctatggtggcggagagtaaaggggacgaacacagcctggggccatccccggagtcccccagcgtccgcctgtggccgtgcctggttggccgcggatcccggcgggcgccgcaaagcggcgggattgccagcgcagagctccggctctctgccttgtccctgggtccgagcaccggagcctctggtgtctgcggggagaagtctcggattgagaaatacgggagggtctcgtcagtggctgcaggtgcggcagccactctggggacccagtgagaatggggtcgcctggctctgcgcgaacccctcacgtgggtgcagctcctgagccgccgagggaggcggtggtaatgtcgcccagtgccagcagagggcagcctcgaggccgtgagcccgaacggcgacctcgccaaaccgcgggctcccttccagctcccggattctgcggggtagaggcggccttggagcccagagaccagcgacctcagtctgcaggagcccggcgcagaggcccaagggcacccccgggatgtggtcaagctacagcccttaggcagcctcactctgcgacggcaagggcttagagggtggagggggaccagatgccttaggaggggttagaaagccaacgcacacagggaatttgttttcaagcaacagattccaagcatgtggaaaccttttaaatgatgctggtgagagctatgatagttttcgcattcttggcgagggaagtcggaggctagtagcgggatggctcctgggcgcgcgggagacagagggaccagcgatccttgctgggggcagagggactgtggaccaaggatccagacacacttaattggggattccagtcccgactgtggccactcaactggcgttgaacttgagcaactcactataccgctctagcctccgactaatcacttctgtaaaatgggcattgtgggctccgagtctcgtaagggcgctagggattcgagacagcaggaatttcctcactgctccagcaaccctgggttcctgggtttgtaggtgggctgaaaggatcctttcatcgcacgtttgcctggcgtggctgctttagagaccgaggcccgccaggctttgcaacccagttgcgcgtggtcagccatggccttggaaccgccgggatcgcctcagcggcactccggccagctcccgacttcccgccctgggcactagggtcacccagctccagaagatagtgcttatcagcacaggaattgagaccccacacccggcgcagtgggtctcccaggaagcctggcgaagagccaaggcccgccggacctgaggtcgcctggggcgctaaacagacccatctatgagcacattcggccaacacacccaagttcaacagtgggcgggatctttggctggcctcgatctctctcacagtgtgtgcaaacgggtacccattagattctttttgcttgtttcctcatctgtaaactttgaaaggagagtatttcccggggtgattctgaaaatcatgccagaactgaaaaggcctgtgtaaatgcgaggtgtaatgatgacttattagaagcagccagccctgtacgtgcctgtaggatagatgctagaacgttctacaaatgtgtgcacatacacatcacgtatgtgtgaaggtgcacacctgtccctagacacttgacaaatgcacacacgtatgcgtgtacctctggctgagagcaaaggggctaatacagggctcatacaggacatcatcctgcagtcttgtgcgtgcacagtacacacgcgagcacgactgtctgtgcctggagacaccgtatggcaccggaggagctgctcagccgtcggtgccacctgggaagtagggtttcgggtgctgctctggagcgcgggaaagtccggatccgggtctgctggtcagcgcttcggcgccgccgggctcctttatctctcatccgccggccggtgagcggctccagtttcaagacccccgatcctgccggtgaggggagggagcgagaaggagtgcgctccgggcccaagaggctgcagggccccactccccaggtctgtcgtccttcctttatctcctcaggtcacacccccacttaaaataaagaagggtgcctgactcattcaggtcagggaagtcggcccccgggagcctcctgccctcacaagccatggtgaagggaggcgaagccagggtttgccacggcctgggagaaaatgcggctgcagggtctctttgggctgcagcgctggcccggggccccaagactgttaaggtgtgtgtgggaggcgcgcagtgtggctaccgaagagccctccatcaccgcaccggcaggccgccgggctcgtcctcctctcatgcttccaagggttctgagctgcgcagcactcgcatcacccagaagtgtctgtggagaaaacgacctcaggtgtaagcccaaggctgctgcctgcaaaggcaatgccgtggagactgggttccacagcgacctgggtttttaagtcaccgaaagctacagggcagggtcacaaacactctcccgccttctctgcagaaccgtgcggctgacaggagagcgttgcgcagaaaattcgaggccgggcgctggaggagtctccgcggcccggagaaggcacagaggcgcccctgagaggcgcagctggaacaggcgatgcacgggttcggatctggccggccaaccgagcccagcggtcgcgaaaaccagagtcgccacagaggttgagcacgattccatttctggggatcgggtccggtggggagccactgtccctaacgcctccagagactttaagtaggacaatataatgctggtaggagcaaggtgcaaggaatttagcggcagaagcctttcgggggggtggggaaaggcagatccgtgcctcgtctgagcctgggggtggggacagcccctggccttgtagcccctgttccggggatcagctgggcccacctaacccccctacatggggttgaaaggggccaatgggacggccccgccgcccctccctcgggattccacagggccctgacccggcctttatctctgcacggtcagcagtcgcgggggcttcaggaaggaggacaaaggcccggtgtcaccgcgggcgggggctcggtttcctggctctctgctcacactcacagcctttagcggttgttgggggaagatttttaaaaatatgtgtcgaatttcctttttttctcttctagaaacaaacaaacaaaaaaggcaaaaggcgaattccccttcactcctcgtccatagagattaaagtttcctgggatcctgccctttttttttctttgactgcctagaaatacttgttctcccttgtacatagaggaaaatgcggggaaaggttttttaaaactcggtttcatactattattattactaaggacaaccgggcaggctgaggtcccaacgtggatgatccgagttggcctcgcgccggggctctgcagccactgccctgtgcgctcagcacctctgggggcgatcagggcccctgcgcttccgcccgccgcccggcagtcgagagcaccctgtgcccagactggccgactcattctcccccgaattttgtttagagctggcaagggggacttagctcgcgccccaagacctgggcttgcagcgccgccaacaggcccggggacacgaggcgctccaggccggggtcttcccggctgctggcccctctcgctccccacccgctggcggcgcctcggtcgcccgcaattgacccaacccgcttcctgcgtttgcccctcaggtttcccgtttctccacaaaggcctaggggagcctcgcccacaggctgaccctgcaacctctggcccggtggctaccttctgcttttctgaaaaagaaaaggaaaaaaaaaaaaaaaaagaaaaaatcaaccagtcgagggaggcgcgtgaggactggaggcgccagccggacagcctatgagtaggtccctgggtcggtgccgcttcgcgggtcagcacggcctttctcagagaaaacctcctaaacgtgtgaagaccgctttgggggaagcgagagggaggttggaggagccccgggcggggtctcagcgcccaccagctgtgccttcagggcttgggtgttcgctgcaacggcaaccgcgtgagcctcactcccacggccaaggggctagggcagggtggatgcaatcgcgtgcgcctggccccggaaggtgctcgcagggggtgcctgtggccagctgggttaggaagtcaaatcctagaaagttattactaaaggttttttttcccccttcctttcttctttccttttttgcttccttccttccttttttttttttaataggggaagggaaaaaacattattgaacatctactataaactgggcacttaaaaattagaaaatttaattattttaataattctgatacacgcacgtatttctgttttatagaggagaacactgaaatttgaatgggtattttgcccaaggttacatagctgttaaagaggacaccaggctccaacccagttcttcctgactaaacaggccaggtctttgcctcatgctgcacaggccacctccgcgaagtgacaagatcccagaacatgcttttcacagctcagcaccaagcctgtgcggcaaacagcctgtgcagcagcagtttctgtggtacagaaacaaacaaaaaaggcaaaaggcacagctcagactgtgcttccttcttctcctgggaggctctcccttactactcctgggaggctctcccttactacgcagctcccttgagcatcagtggcagctaggctcagctgctgtcaagtctcctttaaaaatttcggaggccatttgcctcacagatacctggaagacctctggttggtctcttctcttcttaggacctgagattcctcaaatgtaatgtaattttgggttcctagacccaagacactctttttatgacagctgggagtcctctctccagaaagtggaaagttgctaagactgctcggttttaagaatccttaattcctggttgtcccgaaggcatggggctcttagtcccatcctttccccatcttttctatgggtcccacagtctactccaagaagtaggggctgccacacagtggtggtaggcctgacgggcagggccccagggtcaccaccaggttagatctgcagaatggggacactgcagggatgctgagcctgatcaagatgtttcctggccttagacccccacccagaagccaggagtctggtccggtgatcctgtccatgaagcctggcccagaccttcataaagggaagagctcagttgagagcaaactatcttgggccagactcagattcctggcccatattctgcttgtctggctgcatgaagcctgggtctggccccaatttccacccgccgccagggggctccttgcagccccatctccagccttggcttccaggaaaccctggcaaaggctggatgcacctaacctcggatgaaaggtccagggcctcttgctcatctaagcctcagatctggagcagtgaactatttactgatgcaagctggaaacaggacgtcaataccctctggagtagggtacaggaccatctccagaactccgtaggtccctttcccacagtcccttggtgcatgtacttcaatggcgaagatttctccaggtccctcttgagaacaggacacctccccctgctttctccaaaccaacccacttactctgactgggcaattttagtgaggtggaggtgactctaagaatttctgtgtaaatgtgaggagagggctcatactgtcagcagtgtgtgagatgtttacacccaccacacacataatcttcatgcaagaacgactcattacccaggacattcagaaattggctgggtatttgtattaaactctatttacattgtatttacacactggccaatatatatacacacactcacatggcccagccatctaggccagactgtatatgctaaggcataattgctatataactcaaatacttttgccctcaggaattgcttaaatcagcttctataatagaaactcaaaagtgcgaagagggagagaagagaaaggaaatgagagatgaagaaagcctgccattgaactaaactttcggccctggggaaaatgaccaaacttaagagctttggagaaatcccgagggctggagttagacagatttttcctgtgggcatccatggggaagtggggtatgatttggctcccttctctcacctccttcaatccctgtgtagacccaggaaaccctcactgattgcttcattttgtcttccttacttggtgaggctgctgctctcttcccagccttgggtgccttttgcctttcagttctcggggaggagacaggctggtccttcattgctggccccggccaacttctccgtctcactggaggtgggctgctacctgcccaccagggcttggtcctggaagcttccctcccttgctttctctgcttgagacggcagttgggggagtgctgacagccagcttcagaacagggagcctctgcctgatgaagcaaaggctctgtccatattactttatttttcagcaagccaggaatacacacccacaaatgcacacatcaccaatgaggtatgaatgccacacacactgtggtcccagtaagcacttcctaagtgttagccatatgattattacaatgccaaaaatatatgcccactctgcaggcgaatgacagacacacacacctcccaccctgtcaccaatacacaactgacactgtacacacacatttgcagcagatacagactacacaattacttgcccatgggctaaattttcacgctagacaaagcacaaacagacatgcacacagcaggctgctttctgttctgcaactccccttagccagatagtggagcagccgggcaccaaaggcacccagacaccaggcctgaccagcctctagggcttcctgctccagctgagcctccctctccatcctgctcctgccggttcctggtaagctccagtcccagtcttgaggtgatgccccctgagaatccccgtggcttggtctcctgccttgtagcctctcgcaggatgcctgtggggggcggggggcattctgagcagaagccacttgggcccaactatacataacaggataccaccctgaggttcctaccgcctgaccactggagggctgaagtgagaggcctgcaggctcattcccgtggcgcaaaaccgctcctggcccaccagccggcctggacctgccgccacattgctggccaggccccgagatagacggggggggggcagtgagggctgggtgcggggtctagtctcagctgagcagcagcccgcaagaaccggcggatctatcctatcagaagtcggaagtcatctatcccatcagaagagtgaaagccgaccaccccctaatccgcctgggagaaccagactgcaaccaggtcaaacgcctgtgtgcctgcgcggaagcatggatcttaattcgttatttggggatctcagtaaaggaagagagagaaagaaaaaagactaaatttctgcagccgcgaagtatgttcaatccttactgaaacctccaaatctcctacccatatctcaaggtaaatgaattctgactattaaaaataataaagcagtcacttctcacatttgtacagaggttagcagtttgcagcgcatttccacaaccagaattttatctattaatgtttggaacaaactcttggctgttatagttgactcaaaatcgaaaagtttgagaacaataataaaaacacagccagcccatacacctagtacaactgtgtatgaggtagaatacaaacttgaataggtacaaaaataaaccaagtcctacctacagtcgcgccttgtgaacgaaccacggcagaaaaagtctttctgctgacgttaaacagccgcaacgggccagtgatgacacagaaaacaaacaatcccaggaaaacaaagcagcagcgacagccacaaacgcctgccaccccggttgctctcaatctttgtttaactcattctgaaaaagataaaattttgctgaaaatcttcctcttttaactagctgctgaactaaggagcgacagaaataaagaagtccgtgttaaaagaaggaacacaaaatttattcgggaatcgacaaggcaaaaaacaaaaacaaaacaaaaaaacacaacaaaagtgctctagttctctctagaaaatttggtcccccaaacaacaagctacagtacaaccaggtctatggttttcgggccgggccggctccgggccacaagaccgcctaggtcggccgctgccgggtttcacatttctccttcccaaggtgggagaagcaggaggtttgaaaaacaaaaagcagggaggacgagccgtcccagcagcgtgggccaggcaggcagtgatctccctgcctccaggacttgcatcgaaagatccggggacatttgtttttgatttttttcttcagatagggagagggtgaaacttccccaattggtagacgaaaccatcttttattggatatattctcctaactctgaacacagctttttgaaggcccaacaaaaactctaacgcaaatcttccagaagagaagatgaggaatactaaagcttttgattttcatatttggatttagcaaactccaaggccacaatacttccccggttgcccggtgaattttttttcctttttttttttttaaatactctcttaaaaagttccaccgatctttcaaacaaaacattagccagccgccggggcccggaggtgcccgaagcgacgggactgatagcggaggaaacgcagcctccctccgcgcccgcccgcggtgtaaaccgagtacaggccgtggagccaggctgccccggctcccgctgggtcccaacccccgccccgcctagtgggccccgcggcaagcggcttctgaacagcttcaagagggttcgcggagcaaacacacgtattggtccgtccctttctcgggcagcgcggtcccgccatcagtcctgtccggcgcgtctagccatggactgcacggcagtcgggcggggaacgcggagagcgagcgcaccgacctgtgagagaaggccaagaggtctgcgctgccgacgcccggtcgcacctccgccccgggccctttccgcggtgaatttgggcaggagacgctggggctccggaaagagacgagcccagtagaaagcgcgcagagaggcagcttcaggccaggggagtgcaaggtcacagaggtcagggaggtgagcacaggaggacataaactgaggggacaaagaggagcgacaggagcttaggaaagcgaaaaagcacagagggaccctgggcgctggctccagaggcgggcccagagggtgtgaggtcaggctggcggcggcgtcgtcggctgcgaccggggccggcgtcgcgcgtccctgcatcctcgcatccgtctgcaccggcatgcggtgggctctcagagatcgaggcgcgaatgcagcgcgccggtcttgctgtcgtggtcccagtaagagcaatgcatcatggcgagctcgggctgccgggcacaagcgaactgcaggcccggcgcactggtgggcgcgggcgccgggggcgcggcggtggctgggctggcagggctgagctggcccggcggcggcgcggcggccccgtggtgcggtggggcaggcggcggtgcggcggccgcgtgcagatggtgtgcgtgcggatgcgggtgggggtgcggcggaggcgggggtgcggccggcgggcctcccaggccattgtacgagttcactacgccggggggcagcgccatgctctgcacgcgtgtgtacggcccgtacgaggcggccgggcccgccagccccttgaccacagcggccgcgccagggctaccggggcccgcggctgcagccgcagctgctgcagccgctgcggctgccgccatctggcaggaggcatagggcatgggtgagggaggctgcggtagcggccacgagttgttgaggaagccagactgcaggtacttggggggcgccaggtagccgtagccgtcggccccggcgcccgccacgccgcacccgcctgcggcgcctccggccccgaagagccccttgccgggctggaagtgcgcgggcggcggccggaagggcctcttcatgcggcggcggcgccggtagttgcccttctcgaacatgtcttcgcaggccgggtccagcgtccagtagttgcccttgcgctcgccgccgccctcgcgcggcaccttgatgaagcactcgttgaggctgaggttgtggcggatgctattttgccagcccttcttattcttctcgtagaacgggaacttcgcgatgatgtactggtagatgccggacagcgtgagcctcttctccgcgctctcgcggatcgccatggcgatgagcgccacgtacgagtacgggggcttctgcgccgggtccggcttctccggggctgtcccgccgccacccccaccgcccttgcctgggctcggcggcggcccttctggctccttgactgtgcgaccggtctctggggccagcagggcccccgccgcgtcctcgggctcggggtagctggccatcatgacaaagccggcgcgccgcggccgggccgcctctgctctccgctccaggcgctggcgcggcaaagagttggggcgcacgagtccgcttacggccaagtctcaaacttctggagactgcggatgccgcccgcgcttgcttgctggaggcctgtcgctgctctcccctctccttccccttcccctagggagcggccggcgggagtggagctcagcctctggccatggggagtccgcccaacagagaggggctccggcctcgccgcccctccccgctcaggccagtccccgccttggtgggttttcttttctgcgctcttcccctccccccgccccccggtttcccgaagcacgacccgcgtctctggcggagctgcctcctggagtccctagtgcgccaggagcctcgctctgttctgattcgtatgggctccaccgagttccgcttgcgtcaggcgccttcgcccctatagcggggcggccagccgcgcacgggcgagttcatctccaagtcactttttgtaaacgccccgcacagcctggaccggcctgcccccgcccagcgagcctcaggggcccagccgacagccaggctcacgcgcccttgaaatctgccggtactcgctctgcgggctgggctgggagatgacgaggaccccggtggggtctgcccgcacccggccaaagcccaggaagctcgggccccagcgaggaaaggcgctccaagcctcctcgcggctttcaggtgaaagaaaacgactcctttgctctgccgtttgctgccgtcttgaggctgaacttctagctcggggctggggaggggcgagacggcgagggggctggacggggtagggtggggagagctgctctgaggctttgggaaagtcagcccagaaacgggtgtgactgtacgaagaagcctcggcctggcctgtccctcgcg

SEQ ID NO: 124 - DNA, 1394 bp, Homo Sapiens
cggaaccccggtccgaagccgagacaggagactggatgcgaggccctcccagagctggtttctctcaaacaacttccaaaactcctagatcctaggggtacgccgaaatcccccaaagcagtccaaagaacacaacgagagtcctaacatcccaggtggcggcgcgctggctccctggagcggggcgggacgcggccgcgcggactcacgtgcacaaccgcgcgggacggggccacgcggactcacgtgcacaaccgcgggaccccagcgccagcgggaccccagcgccagcgggaccccagcgccagcgggaccccagcgccagcgggaccccagcgccagcgggaccccagcgccagcgggaccccagcgccagcgggtctgtggcccagtggagcgagtggagcgctggcgacctgagcggagactgcgccctggacgccccagcctagacgtcaagttacagcccgcgcagcagcagcaaaggggaaggggcaggagccgggcacagttggatccggaggtcgtgacccaggggaaagcgtgggcggtcgacccagggcagctgcggcggcgaggcaggtgggctccttgctccctggagccgcccctccccacacctgccctcggcgcccccagcagttttcaccttggccctccgcggtcactgcgggattcggcgttgccgccagcccagtggggagtgaattagcgccctccttcgtcctcggcccttccgacggcacgaggaactcctgtcctgccccacagaccttcggcctccgccgagtgcggtactggagcctgccccgccagggccctggaatcagagaaagtcgctctttggccacctgaagcgtcggatccctacagtgcctcccagcctgggcgggagcggcggctgcgtcgctgaaggttggggtccttggtgcgaaagggaggcagctgcagcctcagccccaccccagaagcggccttcgcatcgctgcggtgggcgttctcgggcttcgacttcgccagcgccgcggggcagaggcacctggagctcgcagggcccagacctgggttggaaaagcttcgctgactgcaggcaagcgtccgggaggggcggccaggcgaagccccggcgctttaccacacacttccgggtcccatgccagttgcatccgcggtattgggcaggaaatggcagggctgaggccgaccctaggagtataagggagccctccatttcctgcccacatttgtcacctccagttttgcaacctatcccagacacacagaaagcaagcaggactggtggggagacggagcttaacaggaatattttccagcagtgagcaggggctgtatgggacgcgggaggagctcagaggaggcgcggagagtgcccg

SEQ ID NO: 125 - DNA, 6357 bp, Homo Sapiens
gtgtggagattgggaaggtgacaaggtgaaggcaattgaaggaagagccgagggggacatggggaaggattttgtttcacccctcctaagttgaaccattgtcctttgaaggccggctcctggagaaattaaagggcccctgtgtgacacagccatgtcatacataaacagaactctgaagcctatcaactcctgaggctaagtaagagggaatgtaggggccaaggcagaagagaaaccaaaacctcagagcgctgagcaaagatgccaatcagagaaagagaaattcatttgcgatgttaattaacaagcggctaattaaaacggcactttgagtgctaatcaatcgccttattaagttacagccatcactggaacaaattgaaacctccccgccccgttttctgcctttggtgcaggcggggccgcgttcccagataccgtgagaggccttggggcgcggaggttgggggcagcctcggtcagctttctcagtctctcccaggtctacagaatacgccactggacaagtgcctaagcagcgacttctggtccagacacaccgcccggggagtaagtagttgcgtcgaagaacaactcattcagcagcagttaacaccgacgtttcctcctagaaagagctcccgcaaagcggggggatgtgacctgtgggcccccagcaggggtaggaggcagttcagcccgagagggggcgctctagggcctggatcctgcatccctatttcctggaacacacccaacgcctcattctgaaaaccctgcttaggccctggccctggtgccgctcagcaaccaggaaagagctggacctgccttcaggcagcaagaacaggactgccagcctcctgtggctctgtctcccgaggctccatgagaaggggatgggggtgcaagaagggaagagtgaggtggtgtgctgggcgtcggggacgaggacgcacgccagccaagacgtgcctcccacccagcccacgcgcgcttccccacccccctggccctccaaaatcggtaagagaattaagatttcgaatccctattttgaggagccttccgcatttcctaattgttaaattcctgcttttcaccaaattcccgggggagaaacatttggcaataagaagggactgtgaatttaaatgctaattgagtgggtcctttttccgcagctccacctgcctggcagcctctgttgaaaccaaacacactcggagcgcccagtgcaacattcttggggtgccgagtagaagcgcagtaaagagagaccctagcggactcctgtctggtttgctttttaccgactcttacagaaaaaaagagaatgccattggaagaagctcttttgcgtggtgggcgatgtgtgggtgggggacttgtggcatggcccacggtgttgtttctgtgcctgcgatgacacacgtatgtcttgagctgtgggctcgccttcctggaggtgcgcccgaccgcatctgctggtgggtctgagcgtgcttggggtgtcccaggagaactgagagaacggctcccacgtgcaaagttccaaagcattaatattttcatcatattatcattattcaatataataatatttgttcggttagcggcactaattaggccacattaaaaccgtagtgtgtccctaatggtgcgtaatgtgctcacactcacatttttctctctgaggatgggcggctgcaggctggtaggggaggagagacaggcaagcggcgggctggattagggcgtgacgccccccaccacgcacacaaacatacacagcccactggatgtctgccgggtgggagccgcaatctccgcgcggtcgatggggccctccgctgcgcactcggccctgcgccgagcaccctgcagcctcctcccgcgacacggcgctttgaactcggcggattgattttgcttcccttcccccttttgtgtgtgtttgcgttcaattggttaggtttttaagatttgggagggctggtgtgaaagaattaaaatactcttaactggagcccctccgccgagaactggaggtcccgcctcctagttcggcgctttcaggaccctcttcccagagggaatttctttcagaaattccagggtgggcttgtaaaagacgcttccgcagagcaggtcccgtcagggtctttttcctgttcctggtgccagcggtcggcccgggcgccccgcagacctcggcgaggtagatgttaagctcggagagtgcccctcccgcaggcgccgtggcgagatcactctgaatatgtaacatatttgtaacgtgcgccgaggtgtgatgtgtgtgctgaaatagggggatgggggaattcgaagccggattgggaaggcgggggggaggcgcacagaactcacaatgtacttcgcaatctaacaatctgaacattcatttattaaaagctgctgcgtgacatttacactgagccaccagtctctgcctctaatccgggcgaaaacgattgtactgccgagttatggctgcagcgtatggggacgctgctgtccgcggccggacagagcccatcagctacaacgcggaaggcctctgcacccccttgggggcgggaggaaagtactgccagtcctgcctgggggccgagggtaacaagcaccgagcctctcgctccacgcagggccagctgcccagctcagcgaagctcttgtgatctggtgcgtgtctctcgctcttccctccccatcaaagaagtaaactttctacctactccccctaatccgatcgtttagagctgctgttttccttttgtcagattcctcctccccgatcagtctgagtacacgatcagaactgctcagagagcaggaagcacattgatttcagcttgttctgtccacagacaggccctgacaaggttgttagaacagccggagaggtctatacaatcacttaattaccaaaactgtcagtcaggcgggacgcggatccgcgtcccgggctgcgctaggcattccagcactgggccgcgcgcgtgattgatcggtgctgatagcaccgcaaaataattacggcgaattttctgatgtgtgattttatcccaagttcatgcttcagagaggtaatcggagaatgagaagggtcagtgccatttcggattacctggaatctgcgagaaagggtaaaatgggggaaggagctccgaggaaaacgggagagatgggggtgcagagagagagggaagaagaaagcgagttatggattgctggagggactgcaagcaattcgtcaaactgtgcaagtgatttccttcagagccagcatatggcagattgattttgtccaacgtcggttttagccacatttaaaatgatccagcggttattactgcgattggcttaggaactgacaggcagttttaggcgcaaggagtatagatcctgtttaccggagatgtgttcgtaactgctgtcaaatacagttaagtaaatatcattagcgaagagctctgttaagagaaatgccaatccaataaatatgcttttcctccccgccctccgcatggctgcctgcgcttcctccagaggttctccttcctgctcctttgctgcttgggtcagacgtcccaggcatggtgctgactcccgccaccttggagccccgagctgagcctcgggcagaagatgacaggccagccgtggggcaaggaggccgcggaaacgcggaacggcttcggggagacggaagcgcccaatgagattcaccctgcagcccgggtccagcccaccttcctcggagattgccgcggccctcgaacccgggcctaggtcttcatgtcccggcggccagaggacgttgcggggaccactggggagctgccctcagtcagctctctgccccacgccggaggtcctggcgcggcttctttcccgaactagactggcgactctgggccaggccccaaggaccgccccggcctctccggctttgcggggagaatctgaggaaccgagtccaagatagccgacctaggctgttttcacccagaccctgcgtccccgacccgctggagtgaatctgacactgccaggttctctctcatggcatggagtgaatgaagagggccatagatccccttacccagcacagtccctcggcaggccctggaaatccacagggagcagaagcacagtattttctgaaccgctccctctccctgggcctgtggccatttgaaggcagagctctgtgcctccaagacagtaggttttcggtcaagtttggagcctggggccccaacacatttacacagggttggcatcaccgtttccttggactaaaggcaggctcctatatcctttttaaaggaacagaaggaaggaaaaggaaaccaacacgggttatgttcagatagtaggcctatggcaattcttcacagccatagagtcctaatccgagtatcttcccagagaggaaaaacccaaaaaacttttaaaagggggaaagctgggtagatcatagcacccattcttcatgcctaggcagaaaaactaacccagagggagcaaaggggtaagaaatatgaagagatcccctctgggagctgaggagcaccctagtttataatttggtcaaaggagaaagtcactggcctcctcctttgatagaggcgtgtcatctatcttcccagggaacatgatggttcacaaatgaagaggctagccctcctgcagcttttttctacagagtgtaaaacacacaccgccttcatcagtgtttgggatgtaaagaaccctgtctatttaaaagagatactgcatttttaaagtcaaacagtaccaatgtatgtggcgaatcaagtaggtaaacaacttacatatggttgctgcacttgaaggaaccatccattctcatgcacagcaaattgaagaaacaatggcactaatgagccttgcaaaatgcaactgtgaataatgaaagacaacactgcattttgcaacagaaagaataaaggtgaaataatcagctagcaaagaggaaaagaaagcgagcaatgattaaatgatcaaaagctggcagagtgaattcaatgtcactgccagacgcagccatctacccacaagtgaaagttaggtttcaagcacagtgtaattatagctggggttgtcagtttgacattaatgcagccagcagaaatttcctaattggcctcagaggagaaagtgaaccagaaaatatattaacattttaaaaaagcatattttgcctaatcctttcactttcgaacaatatttgaagaccaaaatgccccaggcataagaatttaaatgagcaattttgtttttgaaggaaacggccaatgagacagaaaatagactaaagggaaatcattagtggatgagagatactgacaggcttgccttgctgactggctggcctgtcacttgcagtctgtgttctttagttccacgctatgagctaagttgataacatgaaaagacccataaacgtgcagccagaagtcacagcctattatctggaaattcaaatgcaaggggagggggtggcagagaaggcatcggcgaggttgggagggagaggtgtgcatcgagggaggaggaggaggaggaaggggaggagggaaaggaggaggaggaggagaaaagaagccctcattctttggcataaaatcggccatatcagagaacaataataagctattatctgtcataaatgtgctatggactgccaaaaaatgtagtcccgaatcgacaacattgttcgaactgaagatagcaacaaaatgcttaaagttgcggatgtaatttcacatgcgtccgggttgatgtgatatgaccgtatcagggaaacaaagctaagtgcagtcaggatctgttagtacagtggcttttgatggaacagctgaggcacacatcgcccgtggcatggactccggggccgaacgctcacgaccaagacttttgcccttttgaaatgaaatagaaataggggagctgcaggaaaaccgaatcgcgcttagggtcaggagcaagacaggagctttcagcgaagatctgaacattcagaactggaacgggtaattagcagatagccaggaaaaaataaataaataaataaaaaagcctggatggacctctgtaaacaatcattaagaaaaataaaaatgaaccttcttattagcctgccttggaggtagtcagaaacaaacaaccaaagcaagagaggatgaagatttaaataaaataattatgtgcatcattaaaataatcatatatgtttgtacagacacgtatacaccaaggaacgtaatgggggctcctcgcacagtcccaggagatgcagga

SEQ ID NO: 126 - DNA, 9739 bp, Artificial Sequence
  chemically treated genomic DNA (Homo sapiens)
acggaagtatagaaatgtatttaataaatatgtaatagaaggataattaatttaatattaaagtgattagagagttaatgttagggttttatgggtatgttgatattttagaatagagaggattgaaggttagagattttgggtaatttgtatattaagaacgtttttaagttatcggggggaaagatagagttttttttgttttatataaaggggtagatttaaaattatagttttttaaaatttttaaaaatttttgtaagatttgaagagagttttgttttaaattttagtgtatataatataaatatatattattaatatttataataagagattggaattaaagtgtatattattttttaaagttttttaaaattgtttttaattataaaaaggtaaattaaaaattttttttatgttatagtagtttaaaaggtaaataatggaagtagaaaggagatgtatatttgttgaaatttgttatgtattaggtattttatataatttatttttatttgatttttataataattggtaaggtgtgtgttgtaggatattaagaggttatagattttaggaggttaagaaatgatttaaaattttatatttaatagttggtatagtaaagatttgaagttaagaatatttgtttttaaaaattagtcgtatattatgataatatattttaaataaagatgtataaaaagtatttggttttttatagatattatataaaatatgggataatattagtgatatatttaaatttagatattagaaagaagttttttttaatttattttgtaattgtaatttagttgtttattttataggtttttatagtaataattaaatatttttttttttgttttatatgtgtttttaaattgttattaaagatttttggttagtagtttttatattttttggcgttttgttgttaatgttcggtaaatatgggtagttaaggaaaatgtagatggtgttatggaatataaattacgataatatatggtatatatttagttttaataaagtgcgttttttaatttttgggtgtcgttttattatttttttataagattatttatttttagggaaggtttagtttttaaaattagggtaataggtttatatgtgttatatggttatttagatgtatagattatgtgttttaatatttttaagtaagtgtatttagtatatgttttttagtattattatgtgtatttatgaattgttttgtttagatggtaagtttttcgaggataagtgttatgtttgaaattttattttattaattgtgtatggtagagtaataatgttatttattttgtatatagagatatataatttataaattgtttttttaggtaaattttttaattatattgttatattgtgataattgttatattttttagatgaggtttatataggttaagtaattagttagaattataaattaataggtaatgttttttttttgtttataagagaaagttttttttgttttgtaatattttattgttttttttttttaaggtttttattataaaggttaatgtttattggttttttaataaaagtaattattatttagtatttagtatatatatgtaaggtattgttttaagggttttataaatattaatttatttaatttttttaattattttatgagatagatattatttttatttatattttatagataaggaaattgagggatagagagattaatttgtttaaaattagaggattggtaaatagtagtagtgaaatttgaatttagtagtgaagtatagttttatagtgtgtgtttttaaatatatattattttgtttgaataagagtttataaagatttttatttaggatatatgaggagttgtttagtaagaaaagaagtatgtttatttttttttatttgatgtatttgattatattttaaaatttttttttatgttaatagaatttcgcgtattatattaaatttttttgtatcgaaggtatatgtaatggttattttgattgatatgtaaaatatttaaaataaaatatttcgagattcgaggattttttgttttatgaattagatattaaaaaaaaaattgtttaggtattagaagtgttatatatttatatttgtaagttttttttgggatttttagattttttatataagatttttttttgtttgaaatattttagtgtttatttaatgtttgagtttgaaaattatttaattttttttaatttttttatttttagttattttgtttttaggtatagggtagggtaagtatttgtttttaatatgatgtttaatattttttatgtttttattttcgttattttgaaaatatgttagtaaatatttaaatatattgtaaagatttaaaatttggggtgtgtatacgtatattaataggagttatgaattatgtatattgtaggtttatataaattagattttgaagaataagtattatagtaattaagcgggttataataagatattttatgtgaaatgtaaaaattattttgaataaattatttgtaagttaatatttttattagaatgatatatttattatttttgggtttgtgatattgttttaatgtattttggttaattgttttaatggtatattaagaaattattttaggtttttttttttcgttggaatttgtagatttttattttcgtttgaattaaaataatataatattaaaaataattttttattttttaatgtataatattatttttttttgtttagaaatatttaattaaagtaggatataattttagtaattatttttatatagaatgatttttaaattaatagttagttgtatgattaaaaattgggagattgataattaaaataattttaaatgttttgtttatgtgatgaaaatgagtgattttttaatttttttatatatattaaattgattttatagattttttgtattggtgtttaatatagttaagtgtttgaggttatgtaaaataaataattttgagattttattgtaaatgtttgtaatttatgatgtaaattgatttgtgaagaaaaaataggattttatgtcgttgaagttaaagaggtattttttagaaattaaaatagtttcgaaatttgagtattgtattatattaaagtattattatttgaggatttaaaaaagttataaatttggggaaaaatttaaaatagatgtatattagtttagttttaagtaaaggtatcgattttattattttattgtgttttttgtattatagggtttttaatattaatgatgttttaaataattttttttaatttagttttttttagttattgattttgtaattcgggaaggttttgtatgtttaaaagatttggggagtagaggatgggggtgttttttattaattatattaggattattgagtttcgatttaaattataagtatgttgggttttatttaaatttaaagtgaattttttagatttttttttgggatggttcggggaattacgagtttggaatttttgtttatatatcgaggcgtttgttttagagtttggatattggtatttcgggagagtaggttttgcgggagtttggattcgaagggcgagattttatagggttaaggaaagcggtttttgtttttcgttagttttgggggagtagacgtaagaggaggtaagggcgtcgcgagtttttcggatgtattggttttataggtcgtgttcgagtggagtattgcgaatggggttaagaaattttggtttttttcgtcggatttggttgttttcgcgggttttttcgtttatcgcgttttcgtcgcggttcgattttcgcgggttttcgcgtcgaatttatttggtttttatcgtacgggatattttcgatttatttacgtcgcgttattgagtttttgtatcgatattcggcgttttcgttagtagggtttggacgtatcgttttttttgatttcgggtttttttcgcgtttcgttgtttggggtagattggtttcgagagggagttattattttttttgttttagggtttttagggttcgaattcgtgttgggatttgggttaggattagggtttggagtttggagtttgtttgttaggattttcggtttcggcgtcgattggagttcgttggaggttataggattacggcggatggtttggttgttttagggcgtattatgttcgtaggtagatgtttattattaaaaattatcgacgtttattaattaggagattcgtaaggtttgcgtattgaatacggtttaaattttgtttagtggtttttgaaagttaaaagaaagaaatttatcgtttacgtttatgttgaggaatagttttgaatacgagttaagatttgggagagggttaagtgggggtggtggggaatattgttggaggatgtggggttttggtaggggttttacgtattttttagtacgagggtggggggttttaggggacgtttaggatttttttagtttttgcggaaggtttcgttattataagagttcgcgcgggaaggaaagtttttgttttggatatggttagggtcgagtttttaaagtttttaattatttttatataggtagtatttttgggttttattagtgggattttttttagaagggggttacgatatggggagagagagttttttattatttttaaggttaggttttttttaaattcgattttggtttttattttttaaatttaattaatgaagaagttgttttagttaattttaaataggagtgttagatggggaattttttttttatagtgttttggtttgttcgtttttgcggtttttttttcgtttcgaagttagtatttgtttcgttttagagagggttaacgaattgggattgattgtcgattatgttatattaaatttaggttgatttcgtttcgtaggatttttttttttttttttttaaaagtgtttttagataaagattggaattatagtaaaacgaataacgagagtttattttggggaaggaagttattttattttatgttattttattttttatttgtttttttattaatttggtataattttgtttttatgttgggtggataaaatggagggggtcggcggaaatgcgtttagcgttaacgatagttatagagttattttttttattgttttttgattgcggtacgtaagagtagaggtaagcgtttttttaagttggtatattcgagagagtgatacgtattaattaaaagggaaagattatttcggatattttaatagtaataggaataaagatgattcgaattttattaaatgaaacgatatttttatttaattgatcgtaaagtgtttttaattaataatttggtatttatttaaaaggtttaatagaattggaggcgatatattttgtattgataatacgttatgagataatattttttgtttaaaataatttaatatattagaaaaaaatatgttaaatataaataattttgtttttatggagaataaatagttataaagtttaatcgtatattaaagtttagttagaagagtttttttttttttttgtaaattagaaggtaaaataaaaataaaaataaaattttataaatttaggtttgttagcgaattgggatatagattggtttagtttaaggtattttagtttaaatagttatatgaattgaaataaataattaaaagaaaaaaaaaaataaaaaagaaataaataaataaaaaaaaaaggttatttgaatagatatatttttgtgagataaaatgtaaatgttgaaagttagtttatatattatagttaaaataaattttgttcgtgtgtattaatatattttatataaatttagtgtttgtatttagttgggtgttatttaaggtgaatttgacgggatagagagggggaaataaattattgtttttaaataggattttaggaaattaataagaaggaatataagaaaaggggaatggtgggaattaatattgattgagcgtttattgtgtttggtatagcgaggcgttgtatttttattattttatttggtggttttgtttttttttttttttttttatatattttgtttatttttgtttttttaggataatgagtgtaattttttttttttttgattttttttttttgttttttaggattaaagatagggtaaatatatatatatatatatatatatatatatatatatatatatggtaaatatatgatatatatatatggatatatatatattaatttttagatatttttggtattgttttttatagtgaagatgaaaatggagtgagtgtatgggagataagggggtgggaggagatatattattaatggaatataagtaatatgtaaatcggaatttattgttagtagtttagatagttttgttataataattttttagagaaattattgtttgtggtatttttttgtgttaatattattttttttttttttcgttttaatattttttttttttttgtttttttatatatggtgggtttaaatttaaagtatttgatttaacgtaaaaggaggttcgttttttttattaaatttttcgtgttaacgtgaatttcgtagaaaaaggttagttttaaaatttgtgaattttttagttgcgtattttttttattttagttttttaaataagtatattttttttttttgttttgtttttttagcgtatttttaaaaatatatatttaagttggtaattttttttagtttttcgagaatcgtttgggttgtttttttatatttttaaatgtataaaatattttaattttaaaatttgtttttgttttttggttttttaattttagtttttgttaaatagtagttaagaaataagttttttttttttttttttttttcgtttgtttttcgatttttttgtttgtttatttttttattgttaataagatttttttttttatgtaagagtttatcgttgtagttttgcggtgagttaaatttcgcggttttagtatttttttgtttagtttttttttagatttttttaaattcgtttttataaaatttaattttaggttttcgagtaggaaaacgggtaggagttacggagtttgcgtgtttcgtgagatttttggttttgcgtggagtttggtttttcgagtttaagatgcgataggggacgagggatggttagtgaggcgggaagagggtcggttttcgaggttttaaaggggtaacggagaagtagcggggcgcggagggcgtgtaggttgagtgtcgcgggataggcgcgatattggtgttggcgttggcgttatagatttagggttgcggcgtgttttttggtttttagtttgagatcggcgatgttggagtttttgttggtggttttggcggttgttgcggtcgttattatcgaggcggcggaagtcgaattcgcggttagcgtggcgagcggtagttcgaagggcggtgttgggaatattatgtagggcgcgtgcgcggttaggtgcggatgtaggtggtggtgcgcgtgcgttatagcgttgtttagttgtagttgcgtttgaatttgaaaggataagggcgttacgttgtaatgattattttagggtgataatagaatagaaatagagtattaacggcgtttagtttggttagagagagagttgggttgtgtttgggtacggggagagggtatttggttgtgtattttgtttcgatagtgatttttttagtttgttgttgaatttggggttttatatggatattttagtgttttttgggttttcgaaattcgtttagggtaggtttattttttcggatttcgggaatttttttttgtaggaatgtggtcgttttttttgggaattgggttgaaatggtatattggaaagattgcgggtgaggatttttattttttttttttgatgttgttatgtattttttattttattattaaaataacggagtattaataagtaaattacgtaattttttaatgttatttagggaagttattttatttttattataataggtataattgtgagtcggtatttttaatttttattgttataataattatttagggatttcgttaaaatttagattttgattcgtaaggtttaggttggggtttgagattttgaatttttaataattttttagacggtgttgttgttgttggtttaaagattattttttgagtagtaaaggtttttttttaaagttatttttttttttttttttagttatttttttttgtttttaaagttaagtattaggatgttagagttttgtggtattaagagagttaagatttttttaatatcgatttttaatttatggttatatttatttgttttttcggtttaagttattggagattgagagttaatttatgatattataggtatgttaagtaggggttttggttgaggatagggaaggttagatattggttgggaaaggatttcgtttttaggtttggaaagtggggagtttagagtattgggattttttaggattaaattattgttgtaggttgtttttttaaaatgtatttttaaaggtttttttatggttaagggattgtaaaggtagggtagttttgggaagattaagatttttttttttattagagatgaagttttgtttgtagaaatagatttaaaaataaaagaacgaaaaaataaaagtatgagttgggagtatttgtgtttattttttttttgttagagttatttaatgtgattaagaggtagaaaatatttagaaaagtatttagagggttgttttagaaatattttaggattaatttttgtattggatttgataaaattttaattaaaaggttttttttttttttttttttaagggtaatttttagtgtatttttaaaggattagttattgtttttaggtttttttagggatttttatgaggatagaagggattaggtatttaggtttttaatatcgtataggtttttaaagggtagtgggtttattatattattttaaaatgattttttaattatgtagatattgatatttgggtttagagataggtgatgtttaatagtttaagtaaatatttaggtatttttatatttaaaaatagtttgaaattaggttgtatttgtttgttgaaatggtatttttaaagtatttacgttgatataaggtgcgattttataagttttaaattggttggcggtttttatgagaatatttgtaaaaagtataagagaaaaataatgtgaggttaacgtttgtagtattttttagggttttaaagggtataagatagaacgaatttttttgaaaatggattattatttttttaaattgtatttaaaatttaaataaatgtaatttatttttaaattttaggattttattaatagtttttgaagattattaagttaagaattattgttatttttgaggtttttttttttttgttattgtaatagtaatatttattatttttttttttgtttagattattaaatgttttttgtataagaagtatatttttatggagttgatttttttgttttttatatttagtttttcgattttgaaattaaatttataggttggagggggaaaaaaaataaaatttagatgttatgattaaaaatttttttaaattataaaagtataaagagaaaagagtcgtg

SEQ ID NO: 127 - DNA, 9739 bp, Artificial Sequence
  chemically treated genomic DNA (Homo sapiens)
tacgatttttttttttttgtatttttgtaatttaaaaaaatttttagttataatatttaggttttattttttttttttttttaatttataggtttggttttaaaatcgaagagttaaatgtagaaaataagaaaattaattttataaaggtatgttttttatataaggaatatttgatagtttgagtaaagagagaagtagtgaatattattattataatgatagaaaaaaaggaattttaaaaatgataatagtttttgatttaataatttttaaaggttgttaatggagttttaaagtttgggagtaagttatatttatttaaattttggatgtagtttagaaagataatagtttatttttaaaggaattcgttttgttttgtattttttggaattttgaaaaatgttataaacgttaattttatattattttttttttgtattttttataggtgtttttataggggtcgttagttagtttgaagtttgtagagtcgtattttatgttaacgtaggtgttttaaggatgttattttagtaggtaagtatagtttagttttaagttgtttttaaatatgaaaatatttgaatgtttgtttgaattgttgaatattatttgtttttgagtttagatgttaatgtttgtatagttggagaattattttgagatgatatagtggatttattattttttaaaaatttatacggtattaaaggtttgaatgtttagttttttttgtttttatgggaatttttgaaggggtttgggggtagtaattggttttttaaaaatatattaaagattgtttttagagagagaggaaggaaaagttttttgattaagattttgttaaatttaatatagaggttagttttaaggtatttttaaggtaattttttagatatttttttaggtattttttattttttagttatattaaataattttgatagaagaaaaataaatataagtatttttagtttatatttttgttttttcgtttttttgtttttaaatttgtttttgtaaataaagttttatttttggtaaagagagaagttttggtttttttagggttgttttgtttttgtaattttttagttataaagaaatttttaagagtatattttaaaaggatagtttgtagtaatgatttaattttgggaaattttagtgttttgaattttttattttttaagtttgagggcgaaatttttttttaattagtgtttgattttttttatttttagttaggatttttgtttggtatgtttgtgatgttatgaattagtttttagtttttagtgatttggatcggggagatagataggtgtgattatgaattgagagtcggtgttagggagattttagtttttttggtgttataggattttggtattttgatgtttggttttggaaataagagagaatgattgaagaaagagggaggggtgattttaaaaggagatttttattatttaaaaggtaatttttgggttagtagtaataatatcgtttgggagattgttagaaatttagaattttaggttttaatttagattttgcgaattagaatttgaattttaacgagatttttgggtaattgttatggtaataaaggttagaagtatcgatttataattgtgtttattgtggtgaagatggagtaatttttttgaatgatattaaaaagttgcgtagtttgtttgttgatatttcgttgttttggtagtggggtaagagatgtatggtagtattaagagaagagggtaagggtttttattcgtagtttttttaatatattattttagtttagtttttaggggagacggttatatttttgtagaagggggttttcggggttcggggaaataagtttattttaagcgagtttcggagatttaggggatattggagtatttatgtggaattttagatttagtaataggttgagaaggttattgtcggaataagatgtatagttaaatgtttttttttcgtgtttaaatataatttaattttttttttggttaagttggacgtcgttaatgttttgtttttattttgttgttattttaggatagttattgtaacgtgacgtttttgtttttttaggtttaggcgtagttgtagttggatagcgttgtggcgtacgcgtattattatttgtattcgtatttggtcgcgtacgcgttttatatgatgtttttagtatcgtttttcggattgtcgttcgttacgttggtcgcggattcggttttcgtcgtttcggtagtggcggtcgtagtagtcgttaagattattagtaagaattttagtatcgtcgattttagattgaaagttaaaaagtacgtcgtagttttgggtttgtgacgttaacgttagtattaatgtcgcgtttgtttcgcggtatttagtttgtacgtttttcgcgtttcgttgttttttcgttatttttttgagatttcgggagtcggtttttttttcgttttattgattatttttcgttttttatcgtattttggattcggaaagttagattttacgtaggattagggattttacgaggtacgtaggtttcgtggtttttgttcgtttttttattcgagggtttagaattgggttttgtaggagcgggtttgggggagtttggagagagattggataggggagtgttggaatcgcggagtttggtttatcgtaaagttgtaacgatggatttttgtatagaaaaaaaaattttgttaataatgaaaaaatgagtaaataaaaaaatcgaaagataaacgggagagaaaaagaggaagggaatttattttttaattgttatttggtagaagttgaaattggagaattaaggagtaaaaataaattttaaaattaaagtattttatatatttaaaaatatggaaaaataatttagacgattttcgagagattggggggagttattaatttaaatgtgtgtttttaaaaatgcgttaagaaggtaaagtagaaagaagaggtatatttatttaaaaaattaagatgaaaaaagtgcgtagttgggaagtttataggttttgaaattgatttttttttgcgaagtttacgttaatacgagaaatttgatgagagaggcgggtttttttttacgttgaattagatgttttgagtttaaatttattatgtatggaagagtaagaaaagagaaaatattaaaacgaggagagagaaaaataatattaatataaaaaaatgttatagataatgatttttttgagaaattattatggtaaaattgtttggattgttgatagtaaatttcggtttgtatgttatttgtattttattgatggtgtgtttttttttatttttttattttttatgtatttattttatttttatttttattatgaaaaataatattaaaagtatttggaaattgatatatatatatttatatatatatattatatatttgttatatatatatatatatatatatatatatatatatatatatatttgttttgtttttgattttggggaataaaagaaaaaagttagaaagggaaaaaattatatttattgttttaagaagatagaggtgggtagaatatgtggggaaaggaaaaagaaaataagattattaaatgaaataatgaaggtatagcgtttcgttgtgttagatatagtaggcgtttaattagtattagtttttattatttttttttttttgtgtttttttttgttggttttttgaagttttatttgaagatagtggtttatttttttttttttatttcgttaaatttattttaaataatatttagttagatataggtattaggtttgtgtaagatatgttgatatatacgaataaagtttattttgattataatgtgtggattgatttttaatatttgtattttattttataaaggtgtatttatttaagtaattttttttttttgtttgtttgttttttttttgttttttttttttttttggttgtttgttttaatttatgtagttatttaaattgggatattttggattaagttagtttgtattttaattcgttagtaagtttaagtttgtggggttttgtttttgtttttgttttattttttaatttataagaaagaggaaaagtttttttaattgaattttggtatgcggttgagttttgtaattatttgttttttatgaaaataaaattatttatatttgatatatttttttttagtgtattaagttattttaaataaaagatgttattttatgacgtgttgttagtataaaatgtgtcgtttttaattttgttaaattttttaaataagtgttaagttattaattgaagatattttgcgattaattgaatgaaaatatcgttttatttgatggggttcgagttatttttgtttttgttattattaaaatattcgggatagttttttttttttgattaatgcgtattattttttcgaatatattaatttggaaaagcgtttgtttttgtttttacgtgtcgtagttaaggggtagtaagaagggtggttttgtggttgtcgttagcgttgagcgtattttcgtcggttttttttattttatttatttagtatagaaatagggttatattaaattaatgaaagaatagataagaagtaaaataatataggatagagtaatttttttttttaagatggattttcgttattcgttttgttataattttagtttttatttggggatatttttgggaggaaggaaggagggattttgcggagcgaaattaatttgggtttggtatggtataatcgataattagttttagttcgttgattttttttggagcggggtaggtgttgatttcggagcgggaaaagagtcgtaaaggcgggtaggttagggtattgtggagggaggattttttatttgatatttttgtttagggttggttgaagtagtttttttattggttaaatttagaaggtggaagttagaatcgggtttaggaaaagtttggttttgaaaataatgaggagttttttttttttatgtcgtggtttttttttggaagaaattttattagtaaagtttaaaggtgttgtttgtgtggggatagttggagattttgaagattcggttttgattatgtttaaggtaggaattttttttttcgcgcgggtttttgtgatgacgggatttttcgtaaagattgaaagagttttgagcgttttttgggattttttattttcgtgttggagggtgcgtaaaatttttgttaaagttttatattttttagtagtgttttttattatttttatttggtttttttttaggttttagttcgtatttaaagttgttttttagtatagacgtgggcgataggttttttttttttaatttttaaagattattgaataggatttgggtcgtatttagtgcgtaggttttgcgggttttttggttgatgaacgtcggtagtttttaataataaatatttgtttgcgggtatggtacgttttgaagtagttaggttattcgtcgtggttttgtggtttttagcgagttttagtcggcgtcggggtcgggggttttaataggtaggttttaagttttaaattttaattttaatttagattttaatacgggttcggattttggagattttggagtaggggagatggtggttttttttcggggttagtttgttttaagtagcggagcgcgggggaagttcgaggttaaaggaggcggtgcgtttaggttttgttggcggaggcgtcgggtatcggtatagaggtttagtgacgcggcgtgggtgggtcgggaatgtttcgtgcgataggagttaggtgggttcggcgcggagattcgcgggagtcgggtcgcggcgggagcgcggtaggcggagaggttcgcggaggtagttaggttcggcgagaaaggttaaaattttttggttttattcgtagtgttttattcgggtacggtttgtgggattagtgtattcggggagttcgcggcgtttttgtttttttttgcgtttgtttttttaagattaacggaggatagaggtcgttttttttggttttgtggagtttcgtttttcgggtttagattttcgtaaggtttgttttttcggaatgttagtgtttaaattttggggtaggcgtttcggtgtgtgaataagagttttaaattcgtagtttttcgaattattttaagaaggggtttgaggaatttattttaaatttaaataaggtttaatatgtttgtagtttgggtcgaaatttaataattttaatataattaataaaggatatttttattttttgttttttaaattttttgggtatgtaaaattttttcgagttgtaaaattaatgattgggaaaaattgagttaaaagagattgtttaagatattattagtgttaaggattttatgatataagagatatagtaagatagtaagatcggtgtttttgtttggagttgaattgatgtatatttattttgagtttttttttagatttataatttttttgggtttttagatggtaatattttagtataatgtaatgtttaaatttcggaattattttgatttttgaaaaatgtttttttggttttagcgatataggattttgttttttttttataaattagtttatattataaattgtaaatatttgtaataagattttaagattgtttattttatataattttaagtatttgattatgttaaatattagtatagaaaatttgtgaaattagtttaatgtgtgtgagggaattaaaggattatttatttttattatataaataaagtatttaagattgttttgattgttagttttttaatttttagttatataattgattattaatttaagagttattttgtgtaaaaataattattgaggttatattttgttttaattaaatatttttgggtagaagaaaatggtattgtatattgggaagtgggggattgtttttaatattatattattttagtttaaacggaaataaaagtttgtaaattttaacggggaaaaaaggtttgaaatggttttttaatatgttattaaaatagttagttaaaatatattaaagtaatattataaatttagaaataataaatatgttattttaatgagaatgttaatttatagataatttatttaaggtagtttttatattttatatggaatgttttattatgattcgtttgattattgtgatgtttgttttttaaaatttaatttatataggtttgtaatatatataatttataatttttgttgatatacgtatatatattttaaattttaaatttttatagtatgtttggatgtttattagtatgtttttaagatgacgaaaataaaaatataaaaagtgttaaatattatattgaaagtaagtgtttgttttgttttatgtttgaaggtaaagtagttgaaaatgaaaaaattaaaaaggattagataatttttaagtttaggtattgagtgagtattgaaatattttagataaaaaaaaattttgtataagaaatttgaaaattttaagaaagatttatagatgtgagtgtataatatttttgatgtttagataattttttttttggtgtttaatttatgaaataaaaaattttcgagtttcggggtattttgttttgggtattttatatgttagttaaggtaattattatatatgttttcggtgtaggaaagtttagtataatacgcggagttttattggtatgaggaaaggttttagaatataattaaatatattaaatagggaggagtaaatatgtttttttttttgttgaataattttttatatgttttgagtaaggatttttgtagatttttatttaagtagaatagtgtatgtttaagagtatatattgtggagttatgttttattgttggatttaaattttattgttattgtttattagttttttgattttggataagttaatttttttgttttttagtttttttatttgtaaaatgtggataaaaatagtgtttattttatggaatggttaggaggattaaatgagttaatatttgtaaaatttttagaataatgttttgtatatgtatattaagtattaaataataattatttttattaaaaggttaatagatattgatttttgtaataaaaattttaaaagaaaaaaataataaagtgttgtaagataagaaaagtttttttttgtgggtaagaagaaaatattgtttgttagtttgtgattttggttaattgtttagtttgtgtgagttttatttagaagatgtgataattgttataatgtagtagtgtagttaggaggtttatttagaagagtaatttataggttgtgtgtttttatatgtaagatagataatattgttattttgttatgtatagttaataaggtgagattttaggtatggtatttgttttcgaggagtttattatttgggtaaaatagtttataaatatatatgatagtgttaggaagtatgtgttaaatgtatttgtttaaaggtattaggatatataatttgtgtatttgaatggttatataatatatgtgggtttgttgttttggttttggaaattaaattttttttggaaatgagtagttttataaaggaatggtgaagcgatatttagaggttaagaagcgtattttgttaggattaaatgtatattatatgttgtcgtggtttgtgttttatagtattatttgtattttttttggttgtttatgtttatcgagtattagtagtaaaacgttaaaagatataaaggttgttgattaaggatttttaatagtagtttgaaaatatatataaaataaagaaaggaatgtttaattattattatagggatttgtaagatgaataattgagttataattatagagtaaattaagaaggatttttttttaatgtttaaatttaggtatattattaatattgttttatattttatataatatttatgaagagttaagtattttttatatatttttatttgggatgtgttgttatagtatacggttaatttttagaggtagatatttttgattttaaatttttgttatattaattattagatgtaaagttttaggttattttttagttttttaaaatttatgattttttagtgttttgtagtatatattttgttaattattgtgaggattaaataaaaataagttatgtaaggtgtttggtatataataggttttaataaatgtatattttttttttatttttattatttattttttaaattattgtaatatagagaggatttttaatttatttttttgtgattagaagtagttttgaaaaattttgggaggtggtgtgtattttaattttaattttttattgtaagtattgataatgtgtgtttatattgtgtgtattggagtttggaataaagttttttttaaattttgtaaaaatttttagagattttgagggattgtgattttagatttgtttttttgtgtagaatagaaaggattttattttttttttcgataatttgaggacgtttttaatgtgtaggttatttagagtttttgatttttagttttttttattttggaatgttagtatatttatggagttttggtattaattttttagttattttgatattagattgattgtttttttgttgtatatttattgaatatatttttatgttttcgt

SEQ ID NO: 128 - DNA, 4313 bp, Artificial Sequence
  chemically treated genomic DNA (Homo sapiens)
gggtttgattttttgagattcggggaggatttttggtagatgtgtgtttagttagaatatttggtaaggatttttttaatgaagaaaaagtggaggaatttagttttagcgagaagaggtttttttattttgttttagatatatcggatagagggtatattttgattagagttacgtttagtggttaggaggttagtttagtatttttttttttattattttcgttttgggtgggggggtaatttttttgggagtagttgtgggaattgtcgttttttattttagtttagttagtattttgaagtttgtaggggaaggatagtacgtgggatggatattggggaaggagtttcgtaaggttagggtgtaatttttaggttttaggtggtttggtaggttacgttgtttcggagatgtttgttagattttttaagtttatttagggtttggtagtaatttgttggttgtttttgcgggggtttgggttgttgagtacggtgtagttgtttagggttaattagttttagggtgttcgtgttaggttgcggttttttcgtttttttcgtattgagggtatttatggcgtgtaaatgttttcgtatttttagagttgttttatcggatgtttttaggaatttatatatttttataaaaatgtattttaaatgatggataggcgagtttggggtaataacgggtgtttggtgggtagataagagtaaatgggaaggagttcgagggaggagggggaagagaagaggaaatagaatttttagttggatattttgataatagttggaaggaaagtttagaaaagatgaagagagaggaggggagaaattaattggggtttttatttttgtcgttggatttttaattttcgttttaaatgggttttgtttttcggtaaaattagtttaaaggattttaaaataaagaaaacgagatgatcggtttgggagttttttaattagagtagagaagttagaggggggcgggcgatttggttttgaagttttagttgaatagttattttttttttttttggtaaaaaggatttttttagaattttcgaggtttttggattttttttttcgtaaatggagtcgtatattgtattttttcgttttttcggatcgttaagtatgttttatgagggtcgttgttttcgggtggaatgcggtcgtatgtacgcgtttttttgtatacgtatatatacgtatatttataataagtgtttgtaggaggagtgttttgcgcgttagttttgcgtttaagataggaagttgtcgggttatcgagttaaatgggagtgatattatttttttttattagtaaggaaagcggattataaaagtttttttgtatttcggtagtttatttaatattatttatgtattttgtgtaaggaattgtgggatttcgttttacggtaaataatatggaaattttaaaaatagcgatttttttgtgcgtgtttatttacgcgtttcggggtgatttggcggggttgtcgtcgggtgatttatatttttgaatcgcgaagcgatagggaaagcgcgggcgagcgtaggagacgcggtcgggggttttttcgggtttttgggttttcgtattcggagcgggggacgcggtcgttttaaggggaggaggggcggcgggttgtttttgttatttagcggcggtcggagcgttacgtgggcgcgcggcgtcgcggttattggttcgaggtacgtgtttaggagatcggtttgcgacgttattcgagggggttttgttaaaaataagaataaaaatttagagtgaaagtgttttaggttgcgtcgagtggtttggaaattttcgagttcgcgcggaggtcgaggcggcgagggcggcggacggtcggggagcgcgggcggtttagttcggttcggtcgggttttggtttcgcgttttttatttatgcgattcgggtcgcggagttttgcggggttcggcgggggcgcggtcgtacgtcggtggggcgtttcggttcgtagcggggcggcggtcgcgaggagggggtttttatgtgcgtgcgggcggtggcgggcgcgttgatcgcgggcgttcggtattttcgagggtcggttagggcgtgcgggcggggacggtcgggcggcggcggcggtcggagtcggttcgggcgggcgtgagcgtcggggaacgcgttgtttgtatgcgcgtagttttcgtttcgggcggtttaggcggcggcgtcggagttcgaggcggtcggacgcggagaggagcggggagttcgggaggcggttcgcgttttcgtcggattattgcgattgtttagatttcggttgcgcggcgaagtcgaggatttggttttgttgaattttttatcgtttgggcgagcggggcggttcgtggtgtttttaatttagttcgtggatttaaaggtggtttcgcgtcgagcgcggtcggcgatttgtaggattttagttttggtcgcggtcgtcgcgtacgttttcggaagattcggcggggtgggggcgcgggggttttcgtgtgcgtcgcgggagggtcgaaggttgatttggaagggcgttttcggagaattagtgtgggatttattgtgaatagtatggaggagaatgattttaagtttggcgaagtagcggcggcggtggagggatagcggtagtcggaatttagtttcggcggcggttcgggcggcggcggcggtagtagttcgggcgaagcggatatcgggcgtcggcgggttttgatgttgttcgcggttttgtaggcgttcggtaattattagtattcgtatcgtattattaatttttttatcgataatattttgcggttcgagttcggtcggcgaaaggacgcggggatttgttgtgcgggcgcgggaggaggaaggggcggcggagtcggcggcgaaggcggcgcgagcggtgcggagggaggcggcggcgcgggcggttcggagtagtttttgggttcgggttttcgagagtttcggtagaattcgttatgtgcgttcggcgcgggcgggtcgtttttagtcgtcggtagcgatttttcgggtgacggggaaggcggttttaagacgttttcgttgtacggtggcgttaagaaaggcggcgatttcggcggttttttggacgggtcgtttaaggttcgcggtttgggcggcggcgatttgtcggtgagttcggattcggatagttcgtaagtcggcgttaatttgggcgcgtagtttatgttttggtcggcgtgggtttattgtacgcgttattcggatcggttttttttaggtgagttcgcggggattacgcgtttcggttcgtcgcggggaggttcgcggagttggggggcggtgttggcgcgggaatttatcgggaggaaaatatttcgaatttttttcgcgtatacgtataaagatttacgcgatattgtgtgaagttgacgtcggttcgggtagcggttaggagtttagcggtaggattgattcgttagggggtatagattttttaggatcgtagaagggattttttttttttttttgttttttttttttttttttttttttttgttttttttttttgttttttatttcgttttggcgtatttttttttagtttttagtttatgttttttttattgtagttttttttggtgggaacgtggtggttggaagatgggttcggaagtgtatatttttatttttttttttacgattttttaatttaggttaggtcggggacgtatgttttagtttattttagatttgttttattattcggttatttcggttgtgttcggggaagaaaaggcgaggttttttgtcgttttgttttttgtttttcgggtttgcgttgatcggtgggatttaggaggatgtatatagggaaggaggaaaataaaggcgttttttttttttggttttattttgtttgttagcgttagttcgtagtggtggggtttagttttttttttgtatatagcgaggataagggaggtagtcgtttttttcggtatttgttatttttaaatagaaaggatttttttttagggttttttgggggttgttgatgggaaagaggtagtattcgtaggggttttgtagagatgttggatatatttttttatagatttgcgattttaaaaaattaagtttatgtttttgtagaaattattaattgtattttatgcgggtttgcggttgggaatcgttattagaagtggattgtttgatttcgagttggtagcggattttcgttgtttttaaatttttaattattttgcgggggttatttgtttagatt

SEQ ID NO: 129 - DNA, 4313 bp, Artificial Sequence
  chemically treated genomic DNA (Homo sapiens)
gatttgggtaaatgattttcgtaaaatagttgagggtttgggggtagcggggattcgttgttagttcggggttaaatagtttatttttaatggcggtttttagtcgtagattcgtatggaatgtagttgatgatttttataaggatatggatttagttttttaaaatcgtagatttatgaaaaaatatatttagtatttttgtagggtttttgcgaatgttgttttttttttattagtagtttttaggaaattttgagagaaggttttttttatttggggatggtaggtgtcgggagggacggttgttttttttgttttcgttgtgtgtaggaagggggttgagttttattattgcgggttggcgttggtaaataaagtggagttaaggggaaagggcgtttttatttttttttttttttgtgtgtatttttttgagttttatcggttagcgtaggttcgaggggtagaaggtagagcggtaaagggtttcgttttttttttttcgagtatagtcgggataatcggatggtaggataagtttggggtgggttggggtatgcgttttcggtttggtttgagttggaagatcgtagggaaggggatgagagtgtgtattttcgggtttattttttagttattacgtttttattaaaaaaaattatagtgggggagatatgggttaggggttgggaagagatgcgttaaggcggggtggaagatagagaggggagatagggagagaggaaggagagagagagatagagaaagaaagaaggttttttttgcggttttaagaagtttgtattttttagcgaattagttttgtcgttggatttttggtcgttgttcgggtcggcgttagttttatataatgtcgcgtgagtttttgtgcgtgtgcgcgggggaggttcgagatgtttttttttcggtaagttttcgcgttagtatcgttttttagtttcgcgggttttttcgcggcgagtcgggacgcgtggttttcgcgggtttatttgaagaaggtcggttcgagtagcgcgtatagtagatttacgtcggttagagtatgggttgcgcgtttaggttggcgtcggtttgcgagttgttcgagttcgagtttatcgataggtcgtcgtcgtttaagtcgcgggttttgagcgattcgtttagggggtcgtcggggtcgtcgttttttttggcgttatcgtgtagcgagagcgttttggagtcgtttttttcgttattcggagagtcgttgtcggcggttgggagcggttcgttcgcgtcgggcgtatatggcgggttttgtcggggttttcgggagttcgagtttaagagttgtttcgagtcgttcgcgtcgtcgttttttttcgtatcgttcgcgtcgttttcgtcgtcggtttcgtcgttttttttttttttcgcgttcgtatagtaggttttcgcgttttttcgtcggtcgaattcgggtcgtaggatgttgtcgatgaagaagttggtgatgcggtgcgggtgttggtggttgtcgggcgtttgtaggatcgcgggtagtattagagttcgtcggcgttcggtgttcgtttcgttcgggttgttatcgtcgtcgtcgttcgagtcgtcgtcggggttggatttcggttgtcgttgtttttttatcgtcgtcgttgtttcgttaggtttggggttatttttttttatgttgtttatagtaaattttatattggtttttcggggacgtttttttaaattagttttcggttttttcgcggcgtatacggagattttcgcgtttttatttcgtcgagtttttcgagggcgtgcgcggcggtcgcggttagggttgaggttttataagtcgtcggtcgcgttcggcgcggagttatttttgaatttacgaattgggttagaaatattacgagtcgtttcgttcgtttagacgatgagagatttaatagagttaagttttcgatttcgtcgcgtagtcggggtttagatagtcgtagtggttcggcggggacgcgggtcgtttttcgggtttttcgttttttttcgcgttcggtcgtttcgggtttcggcgtcgtcgtttgggtcgttcggggcgagagttgcgcgtatgtaggtagcgcgtttttcggcgtttacgttcgttcgggtcggtttcggtcgtcgtcgtcgttcggtcgttttcgttcgtacgttttagtcggttttcgagggtgtcgggcgttcgcggttagcgcgttcgttatcgttcgtacgtatatggaggtttttttttcgcggtcgtcgtttcgttgcgggtcggggcgttttatcggcgtgcggtcgcgttttcgtcgagtttcgtagagtttcgcggttcgagtcgtatgggtgagagacgcgaggttagggttcggtcgggtcgggttgggtcgttcgcgtttttcggtcgttcgtcgttttcgtcgtttcggttttcgcgcgggttcggaaatttttaggttattcggcgtaatttgagatatttttattttggatttttgtttttatttttaatagagttttttcgagtgacgtcgtaggtcggttttttggatacgtgtttcgggttaatggtcgcggcgtcgcgcgtttacgtgacgtttcggtcgtcgttgggtgataggagtagttcgtcgttttttttttttttaaagcggtcgcgtttttcgtttcgggtgcgggagtttaggaattcggagagattttcgatcgcgttttttgcgttcgttcgcgttttttttgtcgtttcgcggtttaggggtgtgagttattcggcgatagtttcgttaggttatttcggggcgcgtaggtggatacgtataggaagatcgttatttttaagatttttatattgtttatcgtggggcgaaattttataattttttgtataaaatgtataaataatattaaatgagttgtcgagatataaagggatttttgtggttcgttttttttgttgatggagaggaatagtgttatttttatttgattcggtaattcggtagttttttgttttaaacgtagagttggcgcgtaggatattttttttgtagatatttattgtaagtgtgcgtgtgtgtgcgtgtgtagggaggcgcgtgtatacggtcgtattttattcggggatagcgatttttatgaaatatgtttagcgattcgaaagagcgggggaatgtagtatgcggttttatttgcgaagggagaaatttaggagtttcggaggttttaaaggaattttttttgttaaggagaggaggggtgattgtttagttaagattttaaaattaagtcgttcgtttttttttaatttttttattttgattgaggagtttttagatcggttatttcgttttttttgttttaaaattttttaaattaattttgtcggagagtagggtttatttgaaacgagaattaggaatttaacggtaagggtgggagttttagttggtttttttttttttttttttttattttttttagattttttttttagttgttgttagaatgtttaattggaagttttgtttttttttttttttttttttttttttcgggtttttttttatttgtttttgtttatttattaaatattcgttgttattttaggttcgtttgtttattatttaaaatgtatttttatggaaatgtgtgaatttttggaaatattcgatagggtagttttgggggtgcgggagtatttgtacgttatgagtatttttagtgcgggggaggcggggaggtcgtagtttggtacggatattttagggttgattggttttgggtagttgtatcgtgtttagtaatttagattttcgtagaggtagttagtaggttgttgttaggttttgagtgaatttggggagtttggtaagtattttcgaggtagcgtggtttgttaggttatttggggtttgaaggttgtattttggttttgcgaagttttttttttagtgtttattttacgtgttgttttttttttgtaggttttagagtgttggttgggttgggatgagaaacgatagtttttatagttgtttttaggaaaattatttttttatttaggacgggaatggtgggggaggaggtgttgggttggttttttggttattggacgtggttttggttagagtgtgttttttgttcggtgtgtttagggtagggtggggaagttttttttcgttggggttggatttttttattttttttttattggaggagtttttattaaatgttttggttaggtatatatttgttaggggtttttttcgagttttaaaaaattaaattt

SEQ ID NO: 130 - DNA, 16197 bp, Artificial Sequence
  chemically treated genomic DNA (Homo sapiens)
ttttgtaggtggagggggaaagggtttgggggttggtggaggacgtaggagtatgggggagttgtggaaaagacgtggaggtagagttagtaggttttgttaagggataggaggtggttttagagagaaaatgagggattagggatgttttttggggggtggttagttgggtgattgggagaaattgggaaggcgtagattagggtagtaggggtagcgggatcgggggtgttttgaagtgaatacgtgaaattgaaggtgttcgttagttttttagtggaggtatttaggaggtagttggaattggaaggaaatggtgatagtcgttagtatcgtagaggtggcggtggtggtggttatagttggatttttttgggttggtgggaagtgtggaggtgaaggagtagggagtagggggaggtggagaaggaaattttaggtttatatttttattttatttttggttgttatatttttaggaagttttttttgaggttgggatagagggtggggatagtttagtttttttgagagagtttattttcggaggtttgcggtgggagttagggcgcggcggagagggttttttattttttttttagtaagcgggagggaggcgtcgggttgaggttgcgttgagttcgagttcgtcgttcgggtggattcgttttgtttaagcgcggaggggcggaggtttggttgggttgtagcgtggtgcggagtaggacgtcgtttcgtgttatggttattggagacgtacgtttattttttttttcgggttcgtcgattttgttatttttcgttttcggtcgttcgtgggtgttcgttatttagatttttttcgtgttttatgggacgtaagtttttttttagagttcggttttgtaaaagaggtttggagttttcgttatagattttttttttgggttacggaggatgagaagggttatcgagtcgagtcgtaattttgcgtaatttttgatttttttttttttttgtttttacggtattttatcgtttttttttcgttttcgaggttttttagaaaatagcgtagaattgtgtagatgtttaggagatgtgaagatgttggagatgtttaggaggcgacggttacgcgaggagaattgtttttaggtgcgtttttggaacgtacggagatttttcggcggggaaggggtcggggttcgcgttatttagtgtttgtttatcgatttttttttgaagagggggtttagggtttttgttgagggagcggggaggcggtgcgggtttttttcgggtatatatgggtgttcgtttttttttttttttttttttttttcgtacggagagcggagagcggagagcggagagcgatagggaggtagtcgaagatttgaattttgaaaggggagttggcggcgaatggtgaatgagatagttatttaggaagcgagtttagttagttcgggaggcggtggagatttacgttcggaagtaatcggattaggttttagaatgtgatcgtttttcgggtttcgggggagacgttaaggacgcgtaagcggagggcgcggagataattgggagttagagtttttattatttgggttgggaacgtttttgggcgtttcgacggggtggcggtgggggtcgggggaggtttttgagaatcgtgcggttcggggagagtttatttattgttgagtttcgatataggttttgaagttgttgtagtggtttagtttttttttcgttcggttttgcgtagcgcggtgtcgtagagtttaggtcgtgttttcgtttcgtcgtttagagtttattgcggcggtttattggattacgtcggtggggcgatcgtagtttttgatttgtgagttgtaaagagtttcgaggtttatttataaatttgcgtttttagtcgtttttttacgtattcgagttacgtttcgggattcggagagttcggggcgttgggcgttgcggaggaggttcggtttttgtcgttttttttattttttagttcgcgagggatttgggggaagggggagtaagttttcgtttcggaagaaacgttcggaattaaggagtttgatttttggattcgggtgtttgttggatttaggtttttattttcgggtttttcggtcgaattaagggtttcgatagggttcgaggtattcgtatttttaggagataggagttcggttagggcgtattatcgggttttgtttcgagttagaggatgtagtgtagatatttatttttatatcgtttttttatagagtttttttttttttggggcgtcgttgggtatagggtaggtcgttaggaatttttagtaaaattacgttcgtttagaggttcgcggtttttttagagggcgttggggaaagagaggggatttgattttttcgattttcggaggaaaagtgttcggggttttttagggatatagttttggaagtttattttattttagtttaggtcgcggcgaggtggggaggagagttaggagagggggagaggggttttgcgttttgtagaggtttttaattttggaggaaaaagattgggatatatttaagcgagttaaggttcgagttttacgtatttttatttattcggggcggcgtatagttagtttttgtcgggcgtgagtattcgattaagggagtaagtggaatgaaaatttagttgggggggtttttatcgatataattgtttcgtagtcgagtttttggatttttgggagatgtggagagtttggggtcggttttcgtttcgtagagtagattggattgttttaggtgtttggaatgcgtttgtattttgtttttcggattcgcgggagattcgtgtttcgtaagtttttttttttattttagtttgtttttatttatatttcgtcggcgagtgtgttatcgcgaggcgttttttttttcgggaagggagttttttttcgcgtagattcgtattgttttttttttcgttcggttttgttttttaggggtagtttttgtagaaaggagattttttttcgggtcgaagggttattagtttgtagttagtttagtttcggattttgggagatgtttattattttgcggattttgattcgaaattttttttggtcgtttattgcggagagtgttttcgtagagaggtttttaatcgaaggagtttgggttttatattttgtttttaagtttgagtttttagggttgttttgtacgaggtgtagatgaatttgtgtttgtaaataagatagaaaattttaagtgtcgttcgattttttttttttggggaattcgtattttgttttgggagcgtgtttagcgttttagtattaaattttttggtcggggttggtagagtttagagtttcgtttttttttaggcgcggttttttaatatttgtaatttaaatgttgcgtcgcggttaaaattagttttggtagtgcgaatagagaattaaaagtaggtagtgaatgagaatagttcgtattttttttttttggtagacggggaggtgtaaatttcgaggaattttagggtattcgttttaaacgtgggaaattttcgcgcgtatttcgttttttttttttagtttgtgttaatgttttaaatggtgtcgagttgtttaattttgtcgttattatagaggttgttgtgttttaggggattaattgatgtgagatatataaaattttgtaattttataatataaattatagtatagtttttttggagagggttggaatatttgagtgagttttcgagaggaaaagaggagttttttagaggagaaatagagtatttttataatgtgttttaattgagaaattttgttttattgagtttttttttaagtggaattagaagtgttgggatgagagggaaaggatgggagtgcgtttaaaggtggatagtaggtttttatttttggtgggagtgagattggacggtatttttcggaaaggtggtttgggttttggataaggttagaggtaggagtttatgatgtagagatgatatagtgttttttcgcgtgtgagtttacgaaggttattattgaggttttgtgtttgtaaaaggtcgttacgttttatataagtttttatatttaatatagggattgattgggtatagggatttttttatattatatatgtaagtatgtatgttaattaaagatgttcgtgttaaagaaacggttaattttgttgaatttagaggaattgattaattatttaattaagtagaggaaatgtttgaatttaattcgtaatttagttgtttttttatataaaattatatatttttatttatatttgatgaatgaaaaaagaaattagtttatgattttaatttaaatatatgtttttaaaaatatattttttttagtttagttagtatataaattaattgagtttttttggttaagtatgatttagttgtgatatttaagagcgggagtggttgtttagatatttttttttttacgtgaaatttagattaatgagttattatttaataagttgtaggtagtttggttgggttggatttagatggtttgagttaaatttagattgtatttgtttaaaattttgtaaatttttagttacgtaaattttatttttaaaaatgttgggaagttattgtataagagtttaagttatattagtttttttgtgattatttgtagtttttggggaaagaatagaagaaaagaaaatgttagtttttgtgaggtggggttggtgttttaggggttttttttgaatattttgttttttttttaaaggttaaaaggaaggtagtggatatatattagaattttttttatttgtgaatggtcgtaaggttggagaaggtggttagtgtattttaaggtttattatttttttttgtgtttttttttttgttttggtaggtttagttagtttaagttttgggtgttattttttaaatttttttgttaaattaattttatttatttgattggattatttgagaggtgttatttttttttgggttgttgtgattttgagggggtatttttataagagtttaggtattaggtggtgaaatagtttgtgtttttaaatttgttttttttagggttttcgggagattttagagtgtaggtttgtttggggagttttaggggtgggttttgagtggaagtgggtttattttttataggagtttaaattttataggaataagaatagtagtaaaataggataagagagtaggtagggagttgttaaggaaaggcgatttttgggaaggtaggttatttagaataaggtttttttggcgttggagagtcggaagggggagcgggtatagaggatttggtttaggtgtgggggttattagtataagtagagttattttttagatttttttttagaagtagttgttttttagagaaattaggtgagggatagtttttgtatttttatacgttagttttggagatttgtttatttgtttttagtcgttttttttttcgggcgagtttgggttaagtattaagttaggatagaagggcggtttttagtcggtttttggtttattttgtttttttaatatttagggagtttgggtttagtataggcgtttttttagcgatcggggtagaattaggacgtgtaatgcgattgttttttttttttcgtttttcggtagagtttttgttcgcgttaatttatttattaggttttgttcgcgttacgcgcgtttttggtaggtttggggcggggaaaggcgaagcgttgggtacgcgagggtttgtgtattttagtttttacgacgtttttggttttttttaggttcgtcgttgtcgtatttaatttttttttttcgggggttattttgaagaagttttagattttagatttagttttttagatttcgttttcgagttcgttcggtgggtttgtaggtcggttttttttcgtttagaggagagcgtagatacgtaatgttcgttcgttggtttcgttcgttttatttttgtttttcgcgttttttcgtttcggtttttgtttataggtcgggtcggaacgttagttttaggagtcgacggtggttttttgttcgtttcggggaaggtgttgtttttttatcggttttaatttttcgttcggcgtttggggtttggttgcggggttcggtttttagtcgagggcgtagggttggttaggtttgttttggttgaggtggagatttcgtttttagggattgttgggcgtttttgtttcgcgagtaacgagatcgtcgcgagcgaacggtttttattgagtttatttttttaagtgttattacgttaagttagagaagcgaggcgagtggaggggacgtagaggggtcggaaaagttatttttttttggtttcgtttttagataaaaacgggagtttggttcggtattcgggcgttcggtgttttcggggcgttttattgaggttttgtttgtaaaattagcgttcgtgttttgaagcgtacggcgtttggaagttgtttttttgttcgtttttttcgaggtttttttttgtgtagcgagtttgagaaatatggaggatcgtttttcgtaagcgggtggtcgcgggcgtttttcgatttttgggtgaagttagagggaaaacggggttttcgggttagtgttttattttttatttcgggagaaattaatgttcggagagggttcgtttgattcgtatagaaaggtcgattttgagggcggcggtcgttcgggggagaaagcggaggttttgggttcgcgggagcgcggtagtcggggttggtatcgtagaggagagatacgttattgtttcgtatttttagaaagcgcgaggcgtcgttttagttggggtaggcggtcgaggtcggtttttatgcgcgtttttcgaagttttttgaaatattttgcggagtttcgtgtgtatagaatttagtatcgtttagtttttgggtagtttaattttttgtagttttattttagttttttcggttttttgaacggtgattttttttatcgtttttttagagttgtttcgtgtttgggtttattttggggggttcggtattttttagttatttttttttttatttattttttttttttttatttttttttttattttttattttttttttttttaggagagcgatttacgaatttttttttttttagttaattttagggtttagttcgtagattttgcgagggtaggtttttgtttatcggttcgttaggcgttttggaggtgacgttttgttttttagagtttttgttgtagttacgaattggggtttgggtcgtaggaaagtatagggttgaagtttagcgttttggggttatttatattgaggtagttagaggtaaagagttttaagaatttagaaaatattttttaggaagtcgtttaattggtttttatgggataggtggagttattaatttgggatggttttgtaggaattaaagagtttagggttttttttttttttaatattatgtttaggagatttagagtcgttggatttttttttttttgattggtgattattagagtttttagagttgtagaaaattttttttttaaaaaattaagtaagcgttaataagattttttataaatttttattagttttattttttcggggggtaggtagattgtggggtttgattttttgagattcggggaggatttttggtagatgtgtgtttagttagaatatttggtaaggatttttttaatgaagaaaaagtggaggaatttagttttagcgagaagaggtttttttattttgttttagatatatcggatagagggtatattttgattagagttacgtttagtggttaggaggttagtttagtatttttttttttattattttcgttttgggtgggggggtaatttttttgggagtagttgtgggaattgtcgttttttattttagtttagttagtattttgaagtttgtaggggaaggatagtacgtgggatggatattggggaaggagtttcgtaaggttagggtgtaatttttaggttttaggtggtttggtaggttacgttgtttcggagatgtttgttagattttttaagtttatttagggtttggtagtaatttgttggttgtttttgcgggggtttgggttgttgagtacggtgtagttgtttagggttaattagttttagggtgttcgtgttaggttgcggttttttcgtttttttcgtattgagggtatttatggcgtgtaaatgttttcgtatttttagagttgttttatcggatgtttttaggaatttatatatttttataaaaatgtattttaaatgatggataggcgagtttggggtaataacgggtgtttggtgggtagataagagtaaatgggaaggagttcgagggaggagggggaagagaagaggaaatagaatttttagttggatattttgataatagttggaaggaaagtttagaaaagatgaagagagaggaggggagaaattaattggggtttttatttttgtcgttggatttttaattttcgttttaaatgggttttgtttttcggtaaaattagtttaaaggattttaaaataaagaaaacgagatgatcggtttgggagttttttaattagagtagagaagttagaggggggcgggcgatttggttttgaagttttagttgaatagttattttttttttttttggtaaaaaggatttttttagaattttcgaggtttttggattttttttttcgtaaatggagtcgtatattgtattttttcgttttttcggatcgttaagtatgttttatgagggtcgttgttttcgggtggaatgcggtcgtatgtacgcgtttttttgtatacgtatatatacgtatatttataataagtgtttgtaggaggagtgttttgcgcgttagttttgcgtttaagataggaagttgtcgggttatcgagttaaatgggagtgatattatttttttttattagtaaggaaagcggattataaaagtttttttgtatttcggtagtttatttaatattatttatgtattttgtgtaaggaattgtgggatttcgttttacggtaaataatatggaaattttaaaaatagcgatttttttgtgcgtgtttatttacgcgtttcggggtgatttggcggggttgtcgtcgggtgatttatatttttgaatcgcgaagcgatagggaaagcgcgggcgagcgtaggagacgcggtcgggggttttttcgggtttttgggttttcgtattcggagcgggggacgcggtcgttttaaggggaggaggggcggcgggttgtttttgttatttagcggcggtcggagcgttacgtgggcgcgcggcgtcgcggttattggttcgaggtacgtgtttaggagatcggtttgcgacgttattcgagggggttttgttaaaaataagaataaaaatttagagtgaaagtgttttaggttgcgtcgagtggtttggaaattttcgagttcgcgcggaggtcgaggcggcgagggcggcggacggtcggggagcgcgggcggtttagttcggttcggtcgggttttggtttcgcgttttttatttatgcgattcgggtcgcggagttttgcggggttcggcgggggcgcggtcgtacgtcggtggggcgtttcggttcgtagcggggcggcggtcgcgaggagggggtttttatgtgcgtgcgggcggtggcgggcgcgttgatcgcgggcgttcggtattttcgagggtcggttagggcgtgcgggcggggacggtcgggcggcggcggcggtcggagtcggttcgggcgggcgtgagcgtcggggaacgcgttgtttgtatgcgcgtagttttcgtttcgggcggtttaggcggcggcgtcggagttcgaggcggtcggacgcggagaggagcggggagttcgggaggcggttcgcgttttcgtcggattattgcgattgtttagatttcggttgcgcggcgaagtcgaggatttggttttgttgaattttttatcgtttgggcgagcggggcggttcgtggtgtttttaatttagttcgtggatttaaaggtggtttcgcgtcgagcgcggtcggcgatttgtaggattttagttttggtcgcggtcgtcgcgtacgttttcggaagattcggcggggtgggggcgcgggggttttcgtgtgcgtcgcgggagggtcgaaggttgatttggaagggcgttttcggagaattagtgtgggatttattgtgaatagtatggaggagaatgattttaagtttggcgaagtagcggcggcggtggagggatagcggtagtcggaatttagtttcggcggcggttcgggcggcggcggcggtagtagttcgggcgaagcggatatcgggcgtcggcgggttttgatgttgttcgcggttttgtaggcgttcggtaattattagtattcgtatcgtattattaatttttttatcgataatattttgcggttcgagttcggtcggcgaaaggacgcggggatttgttgtgcgggcgcgggaggaggaaggggcggcggagtcggcggcgaaggcggcgcgagcggtgcggagggaggcggcggcgcgggcggttcggagtagtttttgggttcgggttttcgagagtttcggtagaattcgttatgtgcgttcggcgcgggcgggtcgtttttagtcgtcggtagcgatttttcgggtgacggggaaggcggttttaagacgttttcgttgtacggtggcgttaagaaaggcggcgatttcggcggttttttggacgggtcgtttaaggttcgcggtttgggcggcggcgatttgtcggtgagttcggattcggatagttcgtaagtcggcgttaatttgggcgcgtagtttatgttttggtcggcgtgggtttattgtacgcgttattcggatcggttttttttaggtgagttcgcggggattacgcgtttcggttcgtcgcggggaggttcgcggagttggggggcggtgttggcgcgggaatttatcgggaggaaaatatttcgaatttttttcgcgtatacgtataaagatttacgcgatattgtgtgaagttgacgtcggttcgggtagcggttaggagtttagcggtaggattgattcgttagggggtatagattttttaggatcgtagaagggattttttttttttttttgttttttttttttttttttttttttttgttttttttttttgttttttatttcgttttggcgtatttttttttagtttttagtttatgttttttttattgtagttttttttggtgggaacgtggtggttggaagatgggttcggaagtgtatatttttatttttttttttacgattttttaatttaggttaggtcggggacgtatgttttagtttattttagatttgttttattattcggttatttcggttgtgttcggggaagaaaaggcgaggttttttgtcgttttgttttttgtttttcgggtttgcgttgatcggtgggatttaggaggatgtatatagggaaggaggaaaataaaggcgttttttttttttggttttattttgtttgttagcgttagttcgtagtggtggggtttagttttttttttgtatatagcgaggataagggaggtagtcgtttttttcggtatttgttatttttaaatagaaaggatttttttttagggttttttgggggttgttgatgggaaagaggtagtattcgtaggggttttgtagagatgttggatatatttttttatagatttgcgattttaaaaaattaagtttatgtttttgtagaaattattaattgtattttatgcgggtttgcggttgggaatcgttattagaagtggattgtttgatttcgagttggtagcggattttcgttgtttttaaatttttaattattttgcgggggttatttgtttagattatagtaggagtgagttaatttttgggtcgttatttcgtagaattatgcgtgtatatttttgatgaaatttagattttttagttagatttgaaatttgttttattgttttcgttttttttttttgttaatatttaattaatatataggtttataatgtcgggcgaggagattcggtcgggttttgtgcggcgcgggagttcgttgagttagtttttaacggttcgggagttgggtagtatcgttcggttcggtttggttcggtttagtttagtttagtttaagtcgtttatttttatgggttttaaaatatttttgtaagataatgtttttgttttttggttttttcgaaagaaaggggagagagagtttttttggggaggtttgattttgtttttgagatttttaagtatttgttttttgaaagaaaattaagaaaaaaatttaaaaattattattttagggaaatttattgttataaaatggtgtttttttgcgggttgttttatgagtgtattaataagagttttaggattagaagagtttgggggtagagttttggggaagggagtggttggaaatttagatagagatgggttttgggagtaggaggttggggttttttttggagttttgtgttttattttttattatcgtttcggagggttaattttatttttaaatttgtatttatttttattaaagttaggtttattggtttggagttttgggcgtgagtaagataggtattgagtgtgtacgtgtgtatggggtgggtgtttaagtatagggtgtgtgtttttatgggtggtgagtttgtttatgggttgttttaaaagttgtttttggtgtttttgaggtggtgtttatagattttttttttttaggtttgttttttggagagagtataagatttatttggttatgagggagtgtttggtatttattttgggtttttagttcgttttttattttttgttgggtatagttttagtattttagttgatttttttgatttgggtagggtgtagttttagggtttttaaggagatttatattttttttttttttagtgtgttcggtagtttttcggttttgaagggtggggggtttttagttttttttagttatagggatttgtgatgaagttggggttagatgttttttaaagtcgatttatatatcgtataaattgaaatttagaggcgaggttattattttttgttagtggttttgtttttttttttttttatagggaacgttagggggttgagttttttattattaaaaagaaattgatgatatttttttttttttgtttttttttttttgttttttttttatggatagtaggttttagaagttttatagcgattttgtttaaaatttggggtaggtttatagggagaaggttaggttaggtttataagtttgaattttagttgggaggtatagtggggagggttagaagtggatttggataaggttagttgggttattttgttgtttatagtgaagtagttttatgtttggggaaagggtggtgtagttaatatttttgtagagttaggtttttttttttggataggaaatttgggagatttttagtgggtgaaggatttatttattgtgagtagtttagtgtttttttttattaaggagggaagtatatgtattgatttttttttaaaggaatgaatttgggtttatagagtttttggttgggagttatagaggagtttgggtggaggtagatattttgggttttttttgtttttagggtttatttgtttttgatttttatagtttttggtattttgtggggtatttttatgagggtttttattatagtttttagggcgttttttgtttttgtgatcgttttgtagttttttttagtttttttttttttttttttttttagtatttatcgttatttttgtttttgaatagagagttttagaaaggattaggaaaaattaggttagaaagtgtggggagttttgtttatatttaggagttttatttttatttagagattttttatttgtggttagtttgtttattaggtttgttttatagttttatttatattatacgtagtttttttttattaagtggtggaggttcgcgttgagtttatgtttagttcgaagtttagttttatatttggcggtttagtttcgagtggttttgggcgagttattttttttttggggttttagaatttttattcggtgtttattgggtggtatatttttgggtaatttgatttttttttgtttatcgtatttatttaggttttaggtttcgaaaattaaagaagaagaattcgaataaagaggataagcggtcgcgtacggtttttatcgtcgagtagttgtagaggtttaaggtcgagttttagattaataggtatttgacggagtagcggcgttagagtttggcgtaggagttgagttttaacgagttatagattaagatttggttttagaataagcgcgttaagattaagaaggttacgggtaataagaatacgttggtcgtgtattttatggtatagggtttgtataattattttattatagttaaggagggtaagtcggatagcgagtagggcggggggtatggaggttaggttttagttcgcgttaaataatgtaataatttaaaattataaagggttagtgtataaagattatattagtattaatagtgaaaatattgtgtattagttaaggttttgaaatattttatgtatatattatttataggtggtataaaatttaaaatatttgattataaaatatttttttgagttttttgtgtttatgagattatgttaattttatgggttttttttttttttgcgaagggggttgtttagggttttatttttttttaattttttaagttttattatatgatattggatatttttttattattttaaaagaagaaaaaattaaaataatttgttgaagtttaaagattttttattgttgtattttatataattgtgaatcgaataaatagtttttatttggtttatgatttttgttattttgtttgtgttggtttggtgaggatagtaggaggggtttatattttaagtttggattagttattttaaggttttggggagtttaggggatttggtgggagagaggggatttttagggtttttgggttagttttgggatttggttttgggaagtagtttagcgtattttaggtttgttttgggaagtcggttttatgtttattagtagtcgtttaggttcgtagttttattcggttttttttttttatttttttgtatttaatttttttttttttttttttttttttttttttttttttttttttttttttttgttttttttttttttttttttttttttttttttttttttttttttttttttttttttttttttttttttttttttttattaagggtttaatcgtgtgtatatatcgtttgcgtttgtggtttgtgtcgttgtttttagttttatcgtagttttgtcgtaggtttaatttttttgttttgggtattgtttttatgtagaagcgtttcgaggttttggggttaaaggtttggggtgtgtggtttaaagtttaagagcggtggggcgattttttttttggtttggttttaggaattttttgtgattttattagttattatgggtgttagttagggttttagaaatgaggttatggtttattgtttttgggcgggtagaaggttttgtagagggagatggtattatttattttttttttttttttttttttttttttattttttttttttttttttttatttttttttttttttggagtggttgtttttgttatagagaatatttttttaagataaatatgtgtgtttatatatatgtttgtatgtatgtgaatatatatatatatatatatatattaggcgtgtttgagtttatagttttgaaatatgtggttattttgttttttaaaagaatttagaattttttaggatttagaagaaggaagaaagtgtgtaaataattattttttattattattttttgtttttttttgttttttaaaatatatattttatttttgaaggtgtggtatagtgtaaattaaatatatttaatatattttttattaagtatttatatatgtatataaataaatatattatttatatataacgttat

SEQ ID NO: 131 - DNA, 16197 bp, Artificial Sequence
  chemically treated genomic DNA (Homo sapiens)
gtggcgttatatatagataatgtgtttgtttatatatatatataggtatttggtgggaaatatattgaatatatttaatttatattgtattatatttttaaaaataaaatgtatattttaaaaaataagaaaagataaaaagtgatgataagaaatgattatttatatattttttttttttttttagattttggaggattttgagtttttttgaaagataaggtagttatatgttttagaattgtggatttaaatacgtttggtgtgtgtgtgtgtgtgtgtgtgtttatatgtatgtagatatatgtgtaaatatatatatttattttggaagaatgttttttatagtagaagtagttattttaagaaaagaaaaaaataaaggaaaaaaagaaaaaaatagggaagaaaagaaaaaggaaaggaagatagatgatgttatttttttttatagagttttttgttcgtttagaaatagtgagttatggttttatttttgggattttggttggtatttatgatggttggtggagttataggaaatttttggggttaagttaaaaggagggtcgttttatcgtttttgggttttaggttatatattttaggtttttagttttagaatttcgaagcgtttttgtatggaggtagtgtttagggtaggagggttaggtttgcggtaggattgcggtgggattggggatagcgatatagattatagacgtagacgatgtatgtatacggttgggtttttggtgaggaggaggaggaaagagaaggaggaggaggaaggaaggaggaggaggagaagaaaaagaagaagaaaggaggagtaggaggaaggaggaaggaggaagaggaggaaaaaggagaaggaggagggagttaggtgtaggagggtgaggagagggagtcgggtgaggttgcgggtttgggcggttgttggtgagtatggagtcgattttttagagtaggtttggggtacgttgggttgttttttagggttaaattttagaattggtttaaggattttggaagtttttttttttttattaggttttttaagttttttaaggttttgaggtggttggtttaggtttgaggtgtgggttttttttgttgtttttattaagttaatataaataaagtggtagaagttatagattaaataggagttatttattcggtttatagttgtgtgaaatgtagtaataaaaaatttttggattttagtaagttgttttaattttttttttttttggaataataaaaaagtgtttaatgttatataatggagtttaggggattaaaaaaaggtgaaattttaagtagtttttttcgtaaaaaagaaaaaaatttataaaattagtataattttataaatataaaaaatttaaaaaaatattttatagttagatattttggattttatattatttgtaaatgatatatatatagaatattttagaattttagttaatatataatatttttattattaatgttggtataatttttatatattggttttttatgattttaaattattgtattgtttagcgcggattgagatttggtttttatgtttttcgttttattcgttgttcgatttgttttttttggttgtggtggagtggttgtataagttttgtgttatgaggtgtacggttagcgtgtttttgttgttcgtggtttttttgattttggcgcgtttgttttggaattaaattttgatttgtgattcgttgaggtttagtttttgcgttaggttttggcgtcgttgtttcgttaggtatttgttggtttggaattcggttttgagtttttgtagttgttcggcggtaaaggtcgtgcgcggtcgtttgttttttttgttcgggttttttttttttggttttcgagatttgggatttgggtagatacggtggatagagagaagttaggttatttagaggtgtgttatttaataggtatcgggtaaggattttggggttttaagagggaagtgattcgtttaaggttattcgaggttgaatcgttagatgtggggttagatttcggattgggtatgggtttaacgcggatttttattatttggtgagggaggattgcgtgtgatgtaagtgggattatggggtaggtttagtgggtaggttgattataaatgaggggtttttagataaaagtaaaatttttggatgtaagtaaaattttttatattttttggtttggttttttttagttttttttgaggttttttgtttaggaatagggatggcggtaggtgttgagagagaggggaggagagaagattgggaaaggttgtagggcggttatagaagtaggaggcgttttgagggttatgatggggatttttatggggatattttatagggtgttaagggttgtgggaattaggggtaggtgggttttgaggataggaggggtttagagtgtttgtttttatttaagtttttttatgatttttagttaagggttttgtggatttaagtttatttttttaaggaagagttagtgtatgtatttttttttttggtggggaggggtattgagttatttatagtgggtgagttttttatttattggaaattttttaggttttttgtttaggagaggggatttggttttataagggtgttgattgtattattttttttttagatatgggattgttttattgtgggtagtagggtagtttagttgattttgtttaggtttatttttgattttttttattgtgttttttaattgggatttagatttatgaatttgatttggttttttttttgtggatttgttttaggttttggatagggtcgttgtaaggtttttaggatttgttatttatggggaaagggtagagggaggagagtagaaggagggaagtgttattagtttttttttggtgataagaggtttaattttttggcgttttttgtgggggaagaagggggtaaggttattggtagggagtggtgatttcgtttttgggttttaatttgtgcggtgtatgaatcggttttagggagtatttggttttagttttattataggtttttgtggttggagaaggttgggggttttttattttttagggtcggagagttgtcgggtatattgaggagaagaggaatgtggatttttttggaggttttgggattgtattttgtttaggttaggagagttaattagggtgttggggttgtgtttagtaagaggtgggggacgaattggaggtttagggtgaatgttaagtatttttttatggttaagtgagttttgtgttttttttaggagataggtttggagaaagaggatttgtgggtattattttaggagtattaagggtagtttttaaagtaatttataggtaggtttattatttatgagagtatatattttatatttgggtatttattttatgtatacgtatatatttagtgtttgttttgtttacgtttagggttttaggttagtgggtttggttttggtaggggtaggtgtagatttggagatggggttggtttttcggaacggtggtgggggatggggtataaggttttaggagaggttttagttttttgtttttagagtttatttttgtttgggtttttaattatttttttttttagaattttatttttaaatttttttggttttggggtttttgttaatgtatttatgaagtagttcgtaaaaggatattattttatggtaataaatttttttaaaataataatttttaggttttttttttgatttttttttaaaagataaatatttaggagttttagaaatagaattaaatttttttaagaaaatttttttttttttttttttcggagaaattaaagaatagaaatattattttgtagggatattttaaagtttatgaagataggcgatttgggttgggttgagttgggtcgggttaggtcgggtcgggcggtgttgtttagttttcgggtcgttgggggttggtttagcgaattttcgcgtcgtataaagttcggtcgagttttttcgttcggtattgtgagtttgtatgttaattaaatattaataaaggaggaagacgagaataatggagtaaattttagatttagttgagaaatttgaattttattagaaatatgtacgtatagttttgcgggatggcggtttaagggttggtttatttttgttgtgatttgggtaaatgattttcgtaaaatagttgagggtttgggggtagcggggattcgttgttagttcggggttaaatagtttatttttaatggcggtttttagtcgtagattcgtatggaatgtagttgatgatttttataaggatatggatttagttttttaaaatcgtagatttatgaaaaaatatatttagtatttttgtagggtttttgcgaatgttgttttttttttattagtagtttttaggaaattttgagagaaggttttttttatttggggatggtaggtgtcgggagggacggttgttttttttgttttcgttgtgtgtaggaagggggttgagttttattattgcgggttggcgttggtaaataaagtggagttaaggggaaagggcgtttttatttttttttttttttgtgtgtatttttttgagttttatcggttagcgtaggttcgaggggtagaaggtagagcggtaaagggtttcgttttttttttttcgagtatagtcgggataatcggatggtaggataagtttggggtgggttggggtatgcgttttcggtttggtttgagttggaagatcgtagggaaggggatgagagtgtgtattttcgggtttattttttagttattacgtttttattaaaaaaaattatagtgggggagatatgggttaggggttgggaagagatgcgttaaggcggggtggaagatagagaggggagatagggagagaggaaggagagagagagatagagaaagaaagaaggttttttttgcggttttaagaagtttgtattttttagcgaattagttttgtcgttggatttttggtcgttgttcgggtcggcgttagttttatataatgtcgcgtgagtttttgtgcgtgtgcgcgggggaggttcgagatgtttttttttcggtaagttttcgcgttagtatcgttttttagtttcgcgggttttttcgcggcgagtcgggacgcgtggttttcgcgggtttatttgaagaaggtcggttcgagtagcgcgtatagtagatttacgtcggttagagtatgggttgcgcgtttaggttggcgtcggtttgcgagttgttcgagttcgagtttatcgataggtcgtcgtcgtttaagtcgcgggttttgagcgattcgtttagggggtcgtcggggtcgtcgttttttttggcgttatcgtgtagcgagagcgttttggagtcgtttttttcgttattcggagagtcgttgtcggcggttgggagcggttcgttcgcgtcgggcgtatatggcgggttttgtcggggttttcgggagttcgagtttaagagttgtttcgagtcgttcgcgtcgtcgttttttttcgtatcgttcgcgtcgttttcgtcgtcggtttcgtcgttttttttttttttcgcgttcgtatagtaggttttcgcgttttttcgtcggtcgaattcgggtcgtaggatgttgtcgatgaagaagttggtgatgcggtgcgggtgttggtggttgtcgggcgtttgtaggatcgcgggtagtattagagttcgtcggcgttcggtgttcgtttcgttcgggttgttatcgtcgtcgtcgttcgagtcgtcgtcggggttggatttcggttgtcgttgtttttttatcgtcgtcgttgtttcgttaggtttggggttatttttttttatgttgtttatagtaaattttatattggtttttcggggacgtttttttaaattagttttcggttttttcgcggcgtatacggagattttcgcgtttttatttcgtcgagtttttcgagggcgtgcgcggcggtcgcggttagggttgaggttttataagtcgtcggtcgcgttcggcgcggagttatttttgaatttacgaattgggttagaaatattacgagtcgtttcgttcgtttagacgatgagagatttaatagagttaagttttcgatttcgtcgcgtagtcggggtttagatagtcgtagtggttcggcggggacgcgggtcgtttttcgggtttttcgttttttttcgcgttcggtcgtttcgggtttcggcgtcgtcgtttgggtcgttcggggcgagagttgcgcgtatgtaggtagcgcgtttttcggcgtttacgttcgttcgggtcggtttcggtcgtcgtcgtcgttcggtcgttttcgttcgtacgttttagtcggttttcgagggtgtcgggcgttcgcggttagcgcgttcgttatcgttcgtacgtatatggaggtttttttttcgcggtcgtcgtttcgttgcgggtcggggcgttttatcggcgtgcggtcgcgttttcgtcgagtttcgtagagtttcgcggttcgagtcgtatgggtgagagacgcgaggttagggttcggtcgggtcgggttgggtcgttcgcgtttttcggtcgttcgtcgttttcgtcgtttcggttttcgcgcgggttcggaaatttttaggttattcggcgtaatttgagatatttttattttggatttttgtttttatttttaatagagttttttcgagtgacgtcgtaggtcggttttttggatacgtgtttcgggttaatggtcgcggcgtcgcgcgtttacgtgacgtttcggtcgtcgttgggtgataggagtagttcgtcgttttttttttttttaaagcggtcgcgtttttcgtttcgggtgcgggagtttaggaattcggagagattttcgatcgcgttttttgcgttcgttcgcgttttttttgtcgtttcgcggtttaggggtgtgagttattcggcgatagtttcgttaggttatttcggggcgcgtaggtggatacgtataggaagatcgttatttttaagatttttatattgtttatcgtggggcgaaattttataattttttgtataaaatgtataaataatattaaatgagttgtcgagatataaagggatttttgtggttcgttttttttgttgatggagaggaatagtgttatttttatttgattcggtaattcggtagttttttgttttaaacgtagagttggcgcgtaggatattttttttgtagatatttattgtaagtgtgcgtgtgtgtgcgtgtgtagggaggcgcgtgtatacggtcgtattttattcggggatagcgatttttatgaaatatgtttagcgattcgaaagagcgggggaatgtagtatgcggttttatttgcgaagggagaaatttaggagtttcggaggttttaaaggaattttttttgttaaggagaggaggggtgattgtttagttaagattttaaaattaagtcgttcgtttttttttaatttttttattttgattgaggagtttttagatcggttatttcgttttttttgttttaaaattttttaaattaattttgtcggagagtagggtttatttgaaacgagaattaggaatttaacggtaagggtgggagttttagttggtttttttttttttttttttttattttttttagattttttttttagttgttgttagaatgtttaattggaagttttgtttttttttttttttttttttttttttcgggtttttttttatttgtttttgtttatttattaaatattcgttgttattttaggttcgtttgtttattatttaaaatgtatttttatggaaatgtgtgaatttttggaaatattcgatagggtagttttgggggtgcgggagtatttgtacgttatgagtatttttagtgcgggggaggcggggaggtcgtagtttggtacggatattttagggttgattggttttgggtagttgtatcgtgtttagtaatttagattttcgtagaggtagttagtaggttgttgttaggttttgagtgaatttggggagtttggtaagtattttcgaggtagcgtggtttgttaggttatttggggtttgaaggttgtattttggttttgcgaagttttttttttagtgtttattttacgtgttgttttttttttgtaggttttagagtgttggttgggttgggatgagaaacgatagtttttatagttgtttttaggaaaattatttttttatttaggacgggaatggtgggggaggaggtgttgggttggttttttggttattggacgtggttttggttagagtgtgttttttgttcggtgtgtttagggtagggtggggaagttttttttcgttggggttggatttttttattttttttttattggaggagtttttattaaatgttttggttaggtatatatttgttaggggtttttttcgagttttaaaaaattaaattttatagtttatttgtttttcgggaaaatagggttggtgagagtttgtgggaagttttattgacgtttatttggttttttggggggagaattttttgtaattttggaaattttgatgattattagttaggaaagggagggtttaacgattttgggttttttgaatatgatattggggggaggaggggttttgagttttttggtttttgtaaaattattttaggttaatggttttatttgttttatgaaagttaattaggcggttttttgagaagtattttttgaatttttgggattttttgtttttgattgttttagtataaatggttttaagacgttgggttttagttttgtgtttttttgcgatttagattttaattcgtggttgtaatagagattttgggaagtagagcgttatttttagggcgtttggcgggtcggtgggtagagatttgttttcgtagggtttgcgggttgggttttggggttggttggaggaagaggaattcgtgggtcgtttttttggaaaggaggaaggtgagaggtggagggaggaataggagaaagagaaataaatgaagagagagataattagagggtatcgggttttttagagtggatttaaatacgaaataattttgggaaagcggtaagaggggttatcgtttaaagggtcggggaagttgggatggggttgtagaaagttgagttgtttaggggttgggcggtgttgagttttatatatacggaatttcgtaaggtgttttaggaagtttcgagaagcgcgtatgaggatcggtttcggtcgtttgttttagttgggacggcgtttcgcgttttttggggatgcggggtagtggcgtgttttttttttgcgatgttagtttcggttgtcgcgttttcgcgagtttagagttttcgttttttttttcgaacgatcgtcgtttttaaggtcggtttttttgtgcggattagacgagtttttttcggatattagtttttttcgggatggaaagtggggtattgattcgggaatttcgttttttttttagttttatttaggaatcggagagcgttcgcgattattcgtttgcggaggacggttttttatattttttaggttcgttgtataaagaggggtttcggagagggcgagtaggaaagtagtttttagacgtcgtgcgttttaggatacggacgttagttttgtaaataaaattttagtgaagcgtttcggagatatcgggcgttcggatgtcgagttaggttttcgtttttatttgaaaacgaggttagagaagggtgattttttcggtttttttgcgttttttttattcgtttcgtttttttagtttgacgtggtgatatttggaaaaatggatttaatgaaagtcgttcgttcgcggcggtttcgttattcgcggggtagagacgtttaataatttttgagagcgagatttttattttagttaaagtaggtttggttagttttgcgttttcggttgggagtcgagtttcgtagttaagttttaggcgtcgggcggggaattggggtcgataggagagtaatatttttttcggggcgagtagagagttatcgtcggtttttggggttgacgtttcgattcggtttgtagataaaggtcgaaacgaaggggcgcggggagtaggggtggggcgggcggggttaacgggcggatattgcgtgtttgcgtttttttttgggcgaaggaggatcggtttataggtttatcgggcgagttcggggacggggtttgggaggttgggtttagggtttgagatttttttagaataattttcggaaggagggggttaaatgcggtagcggcgggtttgaaaagggttaggagcgtcgtaggaattggggtgtataggttttcgcgtgtttagcgtttcgttttttttcgttttaggtttgttaggggcgcgcgtggcgcgggtagagtttggtgggtgggttggcgcggatagaagttttgtcggggagcggggaggggggggtagtcgtattgtacgttttggttttgtttcgatcgttggagaagcgtttgtgttgagtttaagttttttaggtgttggggaagtagagtgggttaggagtcgattggggatcgtttttttgttttgatttgatatttagtttaggttcgttcggggaggggggcggttgggggtaggtgggtagatttttagagttggcgtgtaaagatgtagaaattgttttttatttggtttttttggaaagtagttgtttttgaaggagaatttgaaggatggttttatttgtgttagtaatttttatatttaaattaggttttttgtgttcgttttttttttcggttttttagcgttaggggagttttattttgggtgatttgtttttttaagaatcgtttttttttggtagttttttgtttgtttttttgttttgttttattgttgtttttatttttataaaatttggatttttgtggaaggtgggtttatttttatttaaggtttatttttgagattttttagatagatttgtattttggagtttttcgggagttttgggaggggtaggtttgggagtatagattgttttattatttaatgtttggatttttatgaaaatgtttttttaaaattatagtaatttagaagaaagtggtattttttaaataatttagttaaataagtaaaattagtttggtaaaggaatttgaagaatggtatttaaggtttgagttggttaagtttattaaaataggaaggaaaatatagaaaaggataatgagttttgaagtatattagttattttttttagttttgcgattatttatagatggaagaaattttagtatgtatttattgttttttttttgatttttggaaagaaaataagatgtttaaaaggaatttttgaaatattagttttattttatagaggttgatattttttttttttttattttttttttaaaggttataagtaattatagagaggttagtgtagtttaaatttttatatagtgattttttagtatttttggaaataggatttgcgtagttagaggtttatagaattttaggtaagtataatttagatttaatttaaattatttggatttagtttagttaaattatttatagtttgttagatgataatttattagtttaggttttacgtgaggaagaaaatatttaaataattattttcgtttttaaatattataattgaattatgtttaattaggagaatttaattagtttatatattggttaagttgggggaaatatatttttaaaaatatatgtttaagttaaagttatgaattgatttttttttttatttattaaatataaataaagatatatagttttatataaaaaggtaattaaattgcgaattaaatttaaatattttttttatttagttaaatgattgattagtttttttgagtttaataaagttggtcgtttttttagtacgagtatttttaattgatatatatgtttatatgtatggtatggggggatttttgtatttaattaatttttgtgttgagtatagaagtttgtgtgaagcgtggcgattttttataagtataaagttttagtagtgattttcgtggatttatacgcggaggggtattgtgttatttttgtattatggatttttgtttttagttttgtttaaggtttaaattattttttcgggggatgtcgtttagttttatttttattagggatggggatttgttgtttatttttggacgtatttttatttttttttttttattttagtatttttggttttatttaaagaaaagtttagtagaataagattttttagttagggtatattatagaagtgttttgttttttttttaaaaaatttttttttttttttcggaaatttatttaaatattttagttttttttagaaaggttgtgttatagtttatgttatggagttgtagggttttgtgtgttttatattagttaattttttaagatataatagtttttgtgatgacggtaaagttgagtaattcgatattatttggagtattaatataggttgggaggaagaaacgggatacgcgcgaagattttttacgtttggagcgaatgttttagaatttttcgggatttatattttttcgtttattaggaaggagaaatgcgagttgtttttatttattgtttgtttttagttttttgttcgtattgttagggttaattttggtcgcggcgtaatatttgggttatagatgttagggggtcgcgtttagggggaagcgggattttgagttttgttagtttcggttagaaagtttggtattaaggcgttgggtacgtttttaggataaagtgcgggttttttaaaagaggaaggtcgggcggtatttagggttttttgttttgtttgtagatataagtttatttgtatttcgtgtaaagtagttttgaaagtttaggtttgaagataaaatgtggagtttaggttttttcgattgaaaatttttttacgaggatatttttcgtagtgggcggttagaaaggatttcggattaagattcgtagagtggtgagtattttttagggttcggggttgaattgattgtaggttggtagtttttcggttcggaggagaattttttttttgtagaaattatttttggaaaataaaatcgagcgaaaagaagggtaatgcgggtttgcgcggaagggagtttttttttcggggaaggaggcgtttcgcggtggtatattcgtcggcgggatgtaggtaggggtagattagggtgagaagggggatttgcggaatacgggtttttcgcgggttcgagggatagggtgtaggcgtattttaggtatttagggtagtttagtttgttttgcggagcgggagtcggttttaggttttttatattttttaggaatttagaagttcgattgcgggatagttgtgtcgatggggatttttttagttggatttttattttatttgtttttttgatcgagtgtttacgttcggtaggagttggttgtgcgtcgtttcgggtgggtggaggtgcgtggggttcgggttttggttcgtttgggtgtgttttagttttttttttttagaattaaaggtttttgtagggcgtagagttttttttttttttttttaatttttttttttatttcgtcgcggtttaagttaagatgaggtgagtttttagggttgtgtttttaggaggtttcgagtatttttttttcgagggtcgaagaaattaggttttttttttttttttagcgttttttgaggaagtcgcgaatttttgagcgagcgtggttttattggggatttttagcgatttgttttgtgtttagcgacgttttaaggggagaggagttttgtggaggggcggtgtgggggtgggtgtttatattatattttttggttcggagtaggattcggtgatgcgttttggtcgagtttttgttttttaggaatgcgggtgtttcgggttttgtcgggatttttggttcgatcggagggttcgggagtgggagtttggatttaataggtattcggatttaggagttagattttttggtttcgaacgtttttttcggagcgaaagtttgttttttttttttttaagtttttcgcgggttgggaggtgaagggagcgatagaagtcgggtttttttcgtagcgtttaacgtttcgggtttttcgggtttcgggacgtggttcgggtgcgtggagggacggttgggggcgtagatttgtgaatgaatttcggagttttttgtagtttatagattagaggttgcgatcgttttatcgacgtggtttaatgagtcgtcgtaataagttttgagcgacgaaacggaggtacggtttggattttgcggtatcgcgttgcgtagggtcggacgggggaggggttgagttattgtagtaattttaaagtttgtgtcggggtttagtaatgggtgggtttttttcgggtcgtacggtttttaagggtttttttcgatttttatcgttatttcgtcggaacgtttagaggcgtttttagtttaagtgatggagattttgatttttagttgttttcgcgtttttcgtttgcgcgtttttggcgtttttttcgggattcggggggcgattatattttgagatttaattcggttattttcgggcgtgggtttttatcgtttttcgggttggttggattcgttttttaagtagttgttttatttattattcgtcgttagttttttttttaaaatttaagttttcggttgtttttttgtcgtttttcgtttttcgtttttcgtttttcgtgcgaggggaggggagggggaggaaggagcggatatttatgtgtgttcgggaggggttcgtatcgttttttcgtttttttagtagaggttttgggttttttttttagagggaaatcggtgagtagatattaagtgacgcgagtttcggtttttttttcgtcgggggattttcgtgcgttttagaagcgtatttggaagtaatttttttcgcgtaatcgtcgttttttaagtatttttagtatttttatattttttaaatatttgtataattttgcgttgttttttggaggatttcggagacggggaggggacgatggggtgtcgtgggggtagggaaggagagaggttaggggttacgtaggattacggttcggttcggtgattttttttatttttcgtggtttagggaggggatttgtagcgagggttttagattttttttgtaaaatcgaattttgggggagggtttgcgttttatgaagtacggggaaggtttaaatgacgaatatttacgagcggtcgggagcggaagatggtaggatcgacgggttcgggagggaagatgggcgtgcgtttttagtgattatggtacgaggcggcgttttgtttcgtattacgttataatttaattaggttttcgttttttcgcgtttgaatagggcgggtttattcgggcggcgagttcgagtttagcgtagttttagttcggcgtttttttttcgtttgttggggaagaggtgggaaatttttttcgtcgcgttttggtttttatcgtaggttttcgagaataaatttttttagggagattgaattgtttttattttttgttttagttttaagagggattttttgaaaatatggtagttaagaatagggtgaaaatgtaagtttgaggtttttttttttatttttttttgttttttgtttttttatttttatattttttattagtttagaggggtttagttgtaattattattatcgttatttttacggtgttgacgattgttattatttttttttagttttagttgttttttggatgtttttattggaaggttgacgagtatttttaattttacgtgtttattttagagtattttcgatttcgttatttttgttgttttgatttgcgtttttttagttttttttagttatttagttggttattttttaggagatatttttgattttttattttttttttagagttattttttgttttttagtaaggtttgttggttttgtttttacgttttttttatagtttttttatatttttgcgttttttattagtttttaagttttttttttttttatttgtaggg

SEQ ID NO: 132 - DNA, 2609 bp, Artificial Sequence
  chemically treated genomic DNA (Homo sapiens)
cgtagattagagatgattatagattttttttagcgcggattaaagggattgaattgaacgttttagtttaatgatttaatttttgttatatttatagggacgcgaatttcgattttataagtaggtgtgtacgtgtatttagatatttatataaagtcgcgtggagggacgaaaagattaattattcgatcgacgaggataggtttgattttttcgattattttagtgtgttagtgtatattttcggttgggtttagcgttttaagaaatttcggaattttagttgttaatttttgtttttttattatgattttttaaagatattttatttgtttatcggggcgaagagaaatgggattaggcgttagggcggtgggattttgtttagggttttgatttcgcgttagggttttagattagtcggttttcgaaggtttttttatttattttatataagaggaaataaagattttttagtttaaggttttagggttgttttttgatttcggttagtttgtaggaagaggaaataataaaataaaggaatcgttaattcgtcgggtattatattttttagttttaattttcgatttcggatcgttagggttattttttttacgttgatttcgttttttttaaatgaaaatacgttaataaaagtatatttcggatataaaatttaagtacgtattttttttggggaggttagagttgaggtgtatttcggaagatgagaattttgtttttatgaattgggtaatatttaggtattgttaggtatttcgatagattttttagatattttttttttttttttttatattttttttttattaaaatagttattgttttgaaatttattagaataacgacgttttaaaaataaaggcgtagtaagtattttttttttcgttgtcgcgggttgaattacggacgttcgcgggtcgtttagtttcgacggttcgtagggggcgcgcgtcgtagtcgtagtatagttcggttatttttagaaagggagtcgaatggagggaagtagggagcgcggagggttcgaggtttgtagataaggagaggcgtattttgggatttgggttttttgttgttataatataatcgtgttattgttggtattgttcgatttaagtgtcggtggtaagcggcgatgtcggggttgggtttttagtaatcgttgtgttttgggttaggttggtcgttttagttatcgggattttttttcggatgtttttagggcgataggtgttgtatttattgacgggatagtcgtatattttcgaataggtagtggagttcgtttttggtaggtattttagttgcgttgatattaaggtcgttatataatagttattagttttttttaagttttagaagtaggttttttttgttttagttatagcggttttagtcgtcgttacgagtttattttttatttttaagcgtatttttttttttttattcgggtttatgttcgttatatagagagaattatatagggggaattatggttttatattttcgaggggatagatatcggtcgtgagataggtattacgtagagttttttggtgattgttcgtaggagcgagattttttttggttttgtagtcggttaggtgtgtgtgtgtgagggtttttagttgattatcgggatgtattgttatttttcggtttggcgggttttgggattttttggttttcgtaggaggttattttaggttttcggaggaggcgtttttagttggcggcgtttttcgtttcgggtttagaggcggatacggtcggtcgcgttttgttggttttttgttcgcgtcgtagcgggttgggagtagttgcgcgatattagatttatagcgttaagacgcgaagcgcgaggaaatcgttgcgtttgatttttttttttttaatttttggatttaggaacgtttttagtttttgcgttttatacgtttagttttggtttttttttcggtttagaagtttttaaggattgaagggttttgtttagggtttcgtatttttgtttgatttttatggtttagaaaagtagggggatatttgaaatgttatttcgggataaatattaataaaaaagtaaatggatttgtgtaggggttagttattaattaattaggtcgtaaggttatttagggtaaatatagtttaggttgggttgggcgagatttttttatggtcgtttttcgatcgaatttttttttttttggtttaggttttttttaggtcgttttggggtaaatatcggacgggaagggggcgtcgttaattttttcgcggggtttggaggttttttcgtttttaagtttcgtagggtagggtcggagtgtttaatatttattttcgttcgaatttcgggtttgcgcgtcgtttttttttgggttcgcggtgttgcgtttgttgttgggtgtgtgtcgttgttttttttcgagtcggtagtttttgttgtgtggtcgaagttttttggaatttttaattggaaattaattttggttttgatagacgtttacgttagaggcgcgttatttatttatatttttcgttttatttcggaggagacgcggcgagaattttgtcgt

SEQ ID NO: 133 - DNA, 2609 bp, Artificial Sequence
  chemically treated genomic DNA (Homo sapiens)
gcgatagggttttcgtcgcgtttttttcgggatgaggcggggggtgtgggtgggtggcgcgtttttgacgtgggcgtttattaagattaagattagtttttaattaaagattttagagggtttcggttatatagtaggagttgtcggttcggaaagagatagcgatatatatttaatagtaagcgtagtatcgcggatttaggggaaggcggcgcgtaggttcgaggttcgggcgggggtgggtgttgggtatttcgattttgttttgcgggatttggaggcgaggaaatttttaaatttcgcgggggagttggcggcgtttttttttcgttcggtgtttgttttagaacgatttaagaaggatttgagttaaggggggaggggttcggtcggggggcggttatgagaaagtttcgtttagtttaatttgggttgtgtttgttttgagtggttttgcggtttggttgattgataattggtttttgtataagtttatttgtttttttgttaatatttatttcggggtgatattttaaatgtttttttgtttttttgggttatgggagttaggtaggagtgcggggttttaggtagagttttttaatttttgaagatttttgggtcgggagagaagttaggattgggcgtgtgggacgtaggagttggaagcgtttttgggtttaagagttgggggagaaggagttaagcgtagcggttttttcgcgtttcgcgttttggcgttgtgggtttggtgtcgcgtagttgtttttagttcgttgcggcgcgaataaagggttagtagggcgcgatcgatcgtgttcgtttttgagttcggggcgaggggcgtcgttagttgggagcgtttttttcgaaggtttaggatggttttttacggagattaaggagttttagagttcgttaggtcgaaaagtggtagtgtatttcggtagttaattggggatttttatatatatatatttagtcgattgtaaaattaaaaaaggtttcgtttttgcggatagttattagaaggttttgcgtggtgtttgttttacggtcggtgtttgttttttcgagggtgtaggattatagttttttttgtgtagttttttttgtgtaacgggtataaattcgggtgaggagagggaggtgcgtttggggataagaagtgggttcgtggcgacgattggaatcgttatggttggggtaggggaaatttatttttggggtttaaggggggttgatggttattgtgtggcgattttggtgttagcgtagttaggatgtttgttagagacgaattttattatttgttcggaggtatgcggttatttcgttaatgggtgtagtatttatcgttttggaagtattcggagagggatttcggtagttggggcgattagtttgatttagggtatagcggttgttagagatttagtttcgatatcgtcgtttattatcgatatttgggtcggatagtgttaataatagtacggttgtgttgtagtagtagaggatttaaattttaggatgcgtttttttttatttgtaagtttcgagtttttcgcgttttttgtttttttttattcggttttttttttgggggtagtcgggttgtgttgcggttgcggcgcgcgttttttgcgggtcgtcggggttgggcgattcgcgagcgttcgtggtttagttcgcggtagcgaagaaagggatgtttgttgcgtttttgtttttagaacgtcgttgttttagtgaattttaaaataataattattttgataggaagaaagtgtgaaggaggaagagaaggatatttagagggtttgtcggggtatttaataatgtttgggtgttatttaatttatgaaaataaaatttttatttttcgaagtatattttagttttaatttttttaaaaaagatgcgtatttggattttgtattcgaagtatgtttttgttggcgtgtttttatttaagaaaagcggggttagcgtagagaaggtgattttggcggttcgaagtcggaggttggagttgagggatataatattcggcggattggcggtttttttgttttgttgttttttttttttgtaaattgatcggagttaggaggtagttttgaggttttgagttgagaagtttttgtttttttttgtgtggggtgggtgaaagggttttcggaggtcgattggtttggagttttggcgcggagttaggattttggatagggttttatcgttttgacgtttggttttattttttttcgtttcggtaggtagatagaatgtttttgggaagttatagtaagaaaataaaaattaatagttaaagtttcgaagttttttagggcgttaggtttagtcgggaatatatattggtatattgaggtaatcgaaaagattaaatttattttcgtcgatcgggtggttgattttttcgtttttttacgcggttttgtgtgagtatttgagtgtacgtgtatatttgtttataaaatcggaattcgcgtttttgtgggtgtgataggggttggattattaagttaaaacgtttaatttagtttttttgattcgcgttggggaaaatttatagttatttttaatttacg

SEQ ID NO: 134 - DNA, 11667 bp, Artificial Sequence
  chemically treated genomic DNA (Homo sapiens)
cgggattcgtgggcgttaattaatgttatggtggcggagagtaaaggggacgaatatagtttggggttattttcggagttttttagcgttcgtttgtggtcgtgtttggttggtcgcggatttcggcgggcgtcgtaaagcggcgggattgttagcgtagagtttcggttttttgttttgtttttgggttcgagtatcggagtttttggtgtttgcggggagaagtttcggattgagaaatacgggagggtttcgttagtggttgtaggtgcggtagttattttggggatttagtgagaatggggtcgtttggttttgcgcgaattttttacgtgggtgtagtttttgagtcgtcgagggaggcggtggtaatgtcgtttagtgttagtagagggtagtttcgaggtcgtgagttcgaacggcgatttcgttaaatcgcgggtttttttttagttttcggattttgcggggtagaggcggttttggagtttagagattagcgattttagtttgtaggagttcggcgtagaggtttaagggtattttcgggatgtggttaagttatagtttttaggtagttttattttgcgacggtaagggtttagagggtggagggggattagatgttttaggaggggttagaaagttaacgtatatagggaatttgtttttaagtaatagattttaagtatgtggaaattttttaaatgatgttggtgagagttatgatagttttcgtatttttggcgagggaagtcggaggttagtagcgggatggtttttgggcgcgcgggagatagagggattagcgatttttgttgggggtagagggattgtggattaaggatttagatatatttaattggggattttagtttcgattgtggttatttaattggcgttgaatttgagtaatttattatatcgttttagttttcgattaattatttttgtaaaatgggtattgtgggtttcgagtttcgtaagggcgttagggattcgagatagtaggaatttttttattgttttagtaattttgggtttttgggtttgtaggtgggttgaaaggatttttttatcgtacgtttgtttggcgtggttgttttagagatcgaggttcgttaggttttgtaatttagttgcgcgtggttagttatggttttggaatcgtcgggatcgttttagcggtatttcggttagttttcgatttttcgttttgggtattagggttatttagttttagaagatagtgtttattagtataggaattgagattttatattcggcgtagtgggttttttaggaagtttggcgaagagttaaggttcgtcggatttgaggtcgtttggggcgttaaatagatttatttatgagtatattcggttaatatatttaagtttaatagtgggcgggatttttggttggtttcgattttttttatagtgtgtgtaaacgggtatttattagattttttttgtttgtttttttatttgtaaattttgaaaggagagtatttttcggggtgattttgaaaattatgttagaattgaaaaggtttgtgtaaatgcgaggtgtaatgatgatttattagaagtagttagttttgtacgtgtttgtaggatagatgttagaacgttttataaatgtgtgtatatatatattacgtatgtgtgaaggtgtatatttgtttttagatatttgataaatgtatatacgtatgcgtgtatttttggttgagagtaaaggggttaatatagggtttatataggatattattttgtagttttgtgcgtgtatagtatatacgcgagtacgattgtttgtgtttggagatatcgtatggtatcggaggagttgtttagtcgtcggtgttatttgggaagtagggtttcgggtgttgttttggagcgcgggaaagttcggattcgggtttgttggttagcgtttcggcgtcgtcgggtttttttattttttattcgtcggtcggtgagcggttttagttttaagattttcgattttgtcggtgaggggagggagcgagaaggagtgcgtttcgggtttaagaggttgtagggttttattttttaggtttgtcgttttttttttatttttttaggttatatttttatttaaaataaagaagggtgtttgatttatttaggttagggaagtcggttttcgggagttttttgtttttataagttatggtgaagggaggcgaagttagggtttgttacggtttgggagaaaatgcggttgtagggtttttttgggttgtagcgttggttcggggttttaagattgttaaggtgtgtgtgggaggcgcgtagtgtggttatcgaagagttttttattatcgtatcggtaggtcgtcgggttcgttttttttttatgtttttaagggttttgagttgcgtagtattcgtattatttagaagtgtttgtggagaaaacgattttaggtgtaagtttaaggttgttgtttgtaaaggtaatgtcgtggagattgggttttatagcgatttgggtttttaagttatcgaaagttatagggtagggttataaatattttttcgttttttttgtagaatcgtgcggttgataggagagcgttgcgtagaaaattcgaggtcgggcgttggaggagttttcgcggttcggagaaggtatagaggcgtttttgagaggcgtagttggaataggcgatgtacgggttcggatttggtcggttaatcgagtttagcggtcgcgaaaattagagtcgttatagaggttgagtacgattttatttttggggatcgggttcggtggggagttattgtttttaacgtttttagagattttaagtaggataatataatgttggtaggagtaaggtgtaaggaatttagcggtagaagtttttcgggggggtggggaaaggtagattcgtgtttcgtttgagtttgggggtggggatagtttttggttttgtagtttttgtttcggggattagttgggtttatttaatttttttatatggggttgaaaggggttaatgggacggtttcgtcgtttttttttcgggattttatagggttttgattcggtttttatttttgtacggttagtagtcgcgggggttttaggaaggaggataaaggttcggtgttatcgcgggcgggggttcggttttttggttttttgtttatatttatagtttttagcggttgttgggggaagatttttaaaaatatgtgtcgaatttttttttttttttttttagaaataaataaataaaaaaggtaaaaggcgaatttttttttatttttcgtttatagagattaaagttttttgggattttgttttttttttttttttgattgtttagaaatatttgtttttttttgtatatagaggaaaatgcggggaaaggttttttaaaattcggttttatattattattattattaaggataatcgggtaggttgaggttttaacgtggatgattcgagttggtttcgcgtcggggttttgtagttattgttttgtgcgtttagtatttttgggggcgattagggtttttgcgttttcgttcgtcgttcggtagtcgagagtattttgtgtttagattggtcgatttattttttttcgaattttgtttagagttggtaagggggatttagttcgcgttttaagatttgggtttgtagcgtcgttaataggttcggggatacgaggcgttttaggtcggggttttttcggttgttggtttttttcgttttttattcgttggcggcgtttcggtcgttcgtaattgatttaattcgttttttgcgtttgttttttaggtttttcgtttttttataaaggtttaggggagtttcgtttataggttgattttgtaatttttggttcggtggttattttttgtttttttgaaaaagaaaaggaaaaaaaaaaaaaaaaagaaaaaattaattagtcgagggaggcgcgtgaggattggaggcgttagtcggatagtttatgagtaggtttttgggtcggtgtcgtttcgcgggttagtacggttttttttagagaaaattttttaaacgtgtgaagatcgttttgggggaagcgagagggaggttggaggagtttcgggcggggttttagcgtttattagttgtgtttttagggtttgggtgttcgttgtaacggtaatcgcgtgagttttatttttacggttaaggggttagggtagggtggatgtaatcgcgtgcgtttggtttcggaaggtgttcgtagggggtgtttgtggttagttgggttaggaagttaaattttagaaagttattattaaaggtttttttttttttttttttttttttttttttttttgtttttttttttttttttttttttttaataggggaagggaaaaaatattattgaatatttattataaattgggtatttaaaaattagaaaatttaattattttaataattttgatatacgtacgtatttttgttttatagaggagaatattgaaatttgaatgggtattttgtttaaggttatatagttgttaaagaggatattaggttttaatttagttttttttgattaaataggttaggtttttgttttatgttgtataggttattttcgcgaagtgataagattttagaatatgttttttatagtttagtattaagtttgtgcggtaaatagtttgtgtagtagtagtttttgtggtatagaaataaataaaaaaggtaaaaggtatagtttagattgtgtttttttttttttttgggaggtttttttttattatttttgggaggtttttttttattacgtagtttttttgagtattagtggtagttaggtttagttgttgttaagttttttttaaaaatttcggaggttatttgttttatagatatttggaagatttttggttggttttttttttttttaggatttgagattttttaaatgtaatgtaattttgggtttttagatttaagatattttttttatgatagttgggagttttttttttagaaagtggaaagttgttaagattgttcggttttaagaatttttaatttttggttgtttcgaaggtatggggtttttagttttattttttttttattttttttatgggttttatagtttattttaagaagtaggggttgttatatagtggtggtaggtttgacgggtagggttttagggttattattaggttagatttgtagaatggggatattgtagggatgttgagtttgattaagatgttttttggttttagatttttatttagaagttaggagtttggttcggtgattttgtttatgaagtttggtttagatttttataaagggaagagtttagttgagagtaaattattttgggttagatttagatttttggtttatattttgtttgtttggttgtatgaagtttgggtttggttttaatttttattcgtcgttagggggttttttgtagttttatttttagttttggtttttaggaaattttggtaaaggttggatgtatttaatttcggatgaaaggtttagggttttttgtttatttaagttttagatttggagtagtgaattatttattgatgtaagttggaaataggacgttaatattttttggagtagggtataggattatttttagaatttcgtaggttttttttttatagttttttggtgtatgtattttaatggcgaagatttttttaggttttttttgagaataggatatttttttttgttttttttaaattaatttatttattttgattgggtaattttagtgaggtggaggtgattttaagaatttttgtgtaaatgtgaggagagggtttatattgttagtagtgtgtgagatgtttatatttattatatatataatttttatgtaagaacgatttattatttaggatatttagaaattggttgggtatttgtattaaattttatttatattgtatttatatattggttaatatatatatatatatttatatggtttagttatttaggttagattgtatatgttaaggtataattgttatataatttaaatatttttgtttttaggaattgtttaaattagtttttataatagaaatttaaaagtgcgaagagggagagaagagaaaggaaatgagagatgaagaaagtttgttattgaattaaattttcggttttggggaaaatgattaaatttaagagttttggagaaatttcgagggttggagttagatagattttttttgtgggtatttatggggaagtggggtatgatttggttttttttttttattttttttaatttttgtgtagatttaggaaatttttattgattgttttattttgttttttttatttggtgaggttgttgttttttttttagttttgggtgttttttgttttttagttttcggggaggagataggttggttttttattgttggtttcggttaattttttcgttttattggaggtgggttgttatttgtttattagggtttggttttggaagttttttttttttgttttttttgtttgagacggtagttgggggagtgttgatagttagttttagaatagggagtttttgtttgatgaagtaaaggttttgtttatattattttattttttagtaagttaggaatatatatttataaatgtatatattattaatgaggtatgaatgttatatatattgtggttttagtaagtattttttaagtgttagttatatgattattataatgttaaaaatatatgtttattttgtaggcgaatgatagatatatatattttttattttgttattaatatataattgatattgtatatatatatttgtagtagatatagattatataattatttgtttatgggttaaatttttacgttagataaagtataaatagatatgtatatagtaggttgttttttgttttgtaattttttttagttagatagtggagtagtcgggtattaaaggtatttagatattaggtttgattagtttttagggttttttgttttagttgagtttttttttttattttgtttttgtcggtttttggtaagttttagttttagttttgaggtgatgttttttgagaattttcgtggtttggttttttgttttgtagtttttcgtaggatgtttgtggggggcggggggtattttgagtagaagttatttgggtttaattatatataataggatattattttgaggtttttatcgtttgattattggagggttgaagtgagaggtttgtaggtttattttcgtggcgtaaaatcgtttttggtttattagtcggtttggatttgtcgttatattgttggttaggtttcgagatagacggggggggggtagtgagggttgggtgcggggtttagttttagttgagtagtagttcgtaagaatcggcggatttattttattagaagtcggaagttatttattttattagaagagtgaaagtcgattattttttaattcgtttgggagaattagattgtaattaggttaaacgtttgtgtgtttgcgcggaagtatggattttaattcgttatttggggattttagtaaaggaagagagagaaagaaaaaagattaaatttttgtagtcgcgaagtatgtttaatttttattgaaatttttaaattttttatttatattttaaggtaaatgaattttgattattaaaaataataaagtagttattttttatatttgtatagaggttagtagtttgtagcgtatttttataattagaattttatttattaatgtttggaataaatttttggttgttatagttgatttaaaatcgaaaagtttgagaataataataaaaatatagttagtttatatatttagtataattgtgtatgaggtagaatataaatttgaataggtataaaaataaattaagttttatttatagtcgcgttttgtgaacgaattacggtagaaaaagtttttttgttgacgttaaatagtcgtaacgggttagtgatgatatagaaaataaataattttaggaaaataaagtagtagcgatagttataaacgtttgttatttcggttgtttttaatttttgtttaatttattttgaaaaagataaaattttgttgaaaattttttttttttaattagttgttgaattaaggagcgatagaaataaagaagttcgtgttaaaagaaggaatataaaatttattcgggaatcgataaggtaaaaaataaaaataaaataaaaaaatataataaaagtgttttagttttttttagaaaatttggttttttaaataataagttatagtataattaggtttatggttttcgggtcgggtcggtttcgggttataagatcgtttaggtcggtcgttgtcgggttttatattttttttttttaaggtgggagaagtaggaggtttgaaaaataaaaagtagggaggacgagtcgttttagtagcgtgggttaggtaggtagtgatttttttgtttttaggatttgtatcgaaagattcggggatatttgtttttgatttttttttttagatagggagagggtgaaatttttttaattggtagacgaaattattttttattggatatatttttttaattttgaatatagttttttgaaggtttaataaaaattttaacgtaaattttttagaagagaagatgaggaatattaaagtttttgatttttatatttggatttagtaaattttaaggttataatattttttcggttgttcggtgaatttttttttttttttttttttttaaatatttttttaaaaagttttatcgattttttaaataaaatattagttagtcgtcggggttcggaggtgttcgaagcgacgggattgatagcggaggaaacgtagttttttttcgcgttcgttcgcggtgtaaatcgagtataggtcgtggagttaggttgtttcggttttcgttgggttttaattttcgtttcgtttagtgggtttcgcggtaagcggtttttgaatagttttaagagggttcgcggagtaaatatacgtattggttcgtttttttttcgggtagcgcggtttcgttattagttttgttcggcgcgtttagttatggattgtacggtagtcgggcggggaacgcggagagcgagcgtatcgatttgtgagagaaggttaagaggtttgcgttgtcgacgttcggtcgtattttcgtttcgggtttttttcgcggtgaatttgggtaggagacgttggggtttcggaaagagacgagtttagtagaaagcgcgtagagaggtagttttaggttaggggagtgtaaggttatagaggttagggaggtgagtataggaggatataaattgaggggataaagaggagcgataggagtttaggaaagcgaaaaagtatagagggattttgggcgttggttttagaggcgggtttagagggtgtgaggttaggttggcggcggcgtcgtcggttgcgatcggggtcggcgtcgcgcgtttttgtattttcgtattcgtttgtatcggtatgcggtgggtttttagagatcgaggcgcgaatgtagcgcgtcggttttgttgtcgtggttttagtaagagtaatgtattatggcgagttcgggttgtcgggtataagcgaattgtaggttcggcgtattggtgggcgcgggcgtcgggggcgcggcggtggttgggttggtagggttgagttggttcggcggcggcgcggcggtttcgtggtgcggtggggtaggcggcggtgcggcggtcgcgtgtagatggtgtgcgtgcggatgcgggtgggggtgcggcggaggcgggggtgcggtcggcgggttttttaggttattgtacgagtttattacgtcggggggtagcgttatgttttgtacgcgtgtgtacggttcgtacgaggcggtcgggttcgttagttttttgattatagcggtcgcgttagggttatcggggttcgcggttgtagtcgtagttgttgtagtcgttgcggttgtcgttatttggtaggaggtatagggtatgggtgagggaggttgcggtagcggttacgagttgttgaggaagttagattgtaggtatttggggggcgttaggtagtcgtagtcgtcggtttcggcgttcgttacgtcgtattcgtttgcggcgttttcggtttcgaagagttttttgtcgggttggaagtgcgcgggcggcggtcggaagggtttttttatgcggcggcggcgtcggtagttgtttttttcgaatatgttttcgtaggtcgggtttagcgtttagtagttgtttttgcgttcgtcgtcgttttcgcgcggtattttgatgaagtattcgttgaggttgaggttgtggcggatgttattttgttagttttttttatttttttcgtagaacgggaatttcgcgatgatgtattggtagatgtcggatagcgtgagtttttttttcgcgttttcgcggatcgttatggcgatgagcgttacgtacgagtacgggggtttttgcgtcgggttcggttttttcggggttgtttcgtcgttatttttatcgtttttgtttgggttcggcggcggtttttttggttttttgattgtgcgatcggtttttggggttagtagggttttcgtcgcgttttcgggttcggggtagttggttattatgataaagtcggcgcgtcgcggtcgggtcgtttttgtttttcgttttaggcgttggcgcggtaaagagttggggcgtacgagttcgtttacggttaagttttaaatttttggagattgcggatgtcgttcgcgtttgtttgttggaggtttgtcgttgttttttttttttttttttttttttttagggagcggtcggcgggagtggagtttagtttttggttatggggagttcgtttaatagagaggggtttcggtttcgtcgttttttttcgtttaggttagttttcgttttggtgggtttttttttttgcgtttttttttttttttcgtttttcggtttttcgaagtacgattcgcgtttttggcggagttgttttttggagtttttagtgcgttaggagtttcgttttgttttgattcgtatgggttttatcgagtttcgtttgcgttaggcgttttcgtttttatagcggggcggttagtcgcgtacgggcgagtttatttttaagttattttttgtaaacgtttcgtatagtttggatcggtttgttttcgtttagcgagttttaggggtttagtcgatagttaggtttacgcgtttttgaaatttgtcggtattcgttttgcgggttgggttgggagatgacgaggatttcggtggggtttgttcgtattcggttaaagtttaggaagttcgggttttagcgaggaaaggcgttttaagttttttcgcggtttttaggtgaaagaaaacgatttttttgttttgtcgtttgttgtcgttttgaggttgaatttttagttcggggttggggaggggcgagacggcgagggggttggacggggtagggtggggagagttgttttgaggttttgggaaagttagtttagaaacgggtgtgattgtacgaagaagtttcggtttggtttgtttttcgcg

SEQ ID NO: 135 - DNA, 11667 bp, Artificial Sequence
  chemically treated genomic DNA (Homo sapiens)
cgcgagggataggttaggtcgaggttttttcgtatagttatattcgtttttgggttgatttttttaaagttttagagtagttttttttattttatttcgtttagttttttcgtcgtttcgtttttttttagtttcgagttagaagtttagttttaagacggtagtaaacggtagagtaaaggagtcgtttttttttatttgaaagtcgcgaggaggtttggagcgttttttttcgttggggttcgagttttttgggttttggtcgggtgcgggtagattttatcggggttttcgttattttttagtttagttcgtagagcgagtatcggtagattttaagggcgcgtgagtttggttgtcggttgggtttttgaggttcgttgggcgggggtaggtcggtttaggttgtgcggggcgtttataaaaagtgatttggagatgaattcgttcgtgcgcggttggtcgtttcgttataggggcgaaggcgtttgacgtaagcggaattcggtggagtttatacgaattagaatagagcgaggtttttggcgtattagggattttaggaggtagtttcgttagagacgcgggtcgtgtttcgggaaatcggggggcggggggaggggaagagcgtagaaaagaaaatttattaaggcggggattggtttgagcggggaggggcggcgaggtcggagtttttttttgttgggcggattttttatggttagaggttgagttttattttcgtcggtcgttttttaggggaaggggaaggagaggggagagtagcgataggtttttagtaagtaagcgcgggcggtattcgtagtttttagaagtttgagatttggtcgtaagcggattcgtgcgttttaattttttgtcgcgttagcgtttggagcggagagtagaggcggttcggtcgcggcgcgtcggttttgttatgatggttagttatttcgagttcgaggacgcggcgggggttttgttggttttagagatcggtcgtatagttaaggagttagaagggtcgtcgtcgagtttaggtaagggcggtgggggtggcggcgggatagtttcggagaagtcggattcggcgtagaagttttcgtattcgtacgtggcgtttatcgttatggcgattcgcgagagcgcggagaagaggtttacgttgttcggtatttattagtatattatcgcgaagttttcgttttacgagaagaataagaagggttggtaaaatagtattcgttataattttagttttaacgagtgttttattaaggtgtcgcgcgagggcggcggcgagcgtaagggtaattattggacgttggattcggtttgcgaagatatgttcgagaagggtaattatcggcgtcgtcgtcgtatgaagaggttttttcggtcgtcgttcgcgtatttttagttcggtaaggggtttttcggggtcggaggcgtcgtaggcgggtgcggcgtggcgggcgtcggggtcgacggttacggttatttggcgttttttaagtatttgtagtttggtttttttaataattcgtggtcgttatcgtagttttttttatttatgttttatgttttttgttagatggcggtagtcgtagcggttgtagtagttgcggttgtagtcgcgggtttcggtagttttggcgcggtcgttgtggttaaggggttggcgggttcggtcgtttcgtacgggtcgtatatacgcgtgtagagtatggcgttgtttttcggcgtagtgaattcgtataatggtttgggaggttcgtcggtcgtattttcgttttcgtcgtatttttattcgtattcgtacgtatattatttgtacgcggtcgtcgtatcgtcgtttgttttatcgtattacggggtcgtcgcgtcgtcgtcgggttagtttagttttgttagtttagttatcgtcgcgttttcggcgttcgcgtttattagtgcgtcgggtttgtagttcgtttgtgttcggtagttcgagttcgttatgatgtattgtttttattgggattacgatagtaagatcggcgcgttgtattcgcgtttcgatttttgagagtttatcgtatgtcggtgtagacggatgcgaggatgtagggacgcgcgacgtcggtttcggtcgtagtcgacgacgtcgtcgttagtttgattttatattttttgggttcgtttttggagttagcgtttagggtttttttgtgttttttcgtttttttaagtttttgtcgtttttttttgtttttttagtttatgtttttttgtgtttatttttttgatttttgtgattttgtatttttttggtttgaagttgtttttttgcgcgttttttattgggttcgttttttttcggagttttagcgttttttgtttaaatttatcgcggaaagggttcggggcggaggtgcgatcgggcgtcggtagcgtagattttttggtttttttttataggtcggtgcgttcgtttttcgcgtttttcgttcgattgtcgtgtagtttatggttagacgcgtcggataggattgatggcgggatcgcgttgttcgagaaagggacggattaatacgtgtgtttgtttcgcgaatttttttgaagttgtttagaagtcgtttgtcgcggggtttattaggcggggcgggggttgggatttagcgggagtcggggtagtttggttttacggtttgtattcggtttatatcgcgggcgggcgcggagggaggttgcgtttttttcgttattagtttcgtcgtttcgggtattttcgggtttcggcggttggttaatgttttgtttgaaagatcggtggaattttttaagagagtatttaaaaaaaaaaaaaggaaaaaaaatttatcgggtaatcggggaagtattgtggttttggagtttgttaaatttaaatatgaaaattaaaagttttagtattttttatttttttttttggaagatttgcgttagagtttttgttgggtttttaaaaagttgtgtttagagttaggagaatatatttaataaaagatggtttcgtttattaattggggaagttttattttttttttatttgaagaaaaaaattaaaaataaatgttttcggatttttcgatgtaagttttggaggtagggagattattgtttgtttggtttacgttgttgggacggttcgttttttttgttttttgttttttaaattttttgttttttttattttgggaaggagaaatgtgaaattcggtagcggtcgatttaggcggttttgtggttcggagtcggttcggttcgaaaattatagatttggttgtattgtagtttgttgtttgggggattaaattttttagagagaattagagtatttttgttgtgtttttttgttttgtttttgttttttgttttgtcgattttcgaataaattttgtgtttttttttttaatacggatttttttatttttgtcgttttttagtttagtagttagttaaaagaggaagatttttagtaaaattttattttttttagaatgagttaaataaagattgagagtaatcggggtggtaggcgtttgtggttgtcgttgttgttttgtttttttgggattgtttgttttttgtgttattattggttcgttgcggttgtttaacgttagtagaaagattttttttgtcgtggttcgtttataaggcgcgattgtaggtaggatttggtttatttttgtatttatttaagtttgtattttattttatatatagttgtattaggtgtatgggttggttgtgtttttattattgtttttaaatttttcgattttgagttaattataatagttaagagtttgttttaaatattaatagataaaattttggttgtggaaatgcgttgtaaattgttaatttttgtataaatgtgagaagtgattgttttattatttttaatagttagaatttatttattttgagatatgggtaggagatttggaggttttagtaaggattgaatatatttcgcggttgtagaaatttagttttttttttttttttttttttttttattgagatttttaaataacgaattaagatttatgttttcgcgtaggtatataggcgtttgatttggttgtagtttggtttttttaggcggattagggggtggtcggtttttatttttttgatgggatagatgattttcgatttttgataggatagattcgtcggtttttgcgggttgttgtttagttgagattagatttcgtatttagtttttattgtttttttttcgtttatttcggggtttggttagtaatgtggcggtaggtttaggtcggttggtgggttaggagcggttttgcgttacgggaatgagtttgtaggttttttattttagttttttagtggttaggcggtaggaattttagggtggtattttgttatgtatagttgggtttaagtggtttttgtttagaatgtttttcgttttttataggtattttgcgagaggttataaggtaggagattaagttacggggatttttagggggtattattttaagattgggattggagtttattaggaatcggtaggagtaggatggagagggaggtttagttggagtaggaagttttagaggttggttaggtttggtgtttgggtgtttttggtgttcggttgttttattatttggttaaggggagttgtagaatagaaagtagtttgttgtgtgtatgtttgtttgtgttttgtttagcgtgaaaatttagtttatgggtaagtaattgtgtagtttgtatttgttgtaaatgtgtgtgtatagtgttagttgtgtattggtgatagggtgggaggtgtgtgtgtttgttattcgtttgtagagtgggtatatatttttggtattgtaataattatatggttaatatttaggaagtgtttattgggattatagtgtgtgtggtatttatattttattggtgatgtgtgtatttgtgggtgtgtatttttggtttgttgaaaaataaagtaatatggatagagtttttgttttattaggtagaggttttttgttttgaagttggttgttagtatttttttaattgtcgttttaagtagagaaagtaagggagggaagtttttaggattaagttttggtgggtaggtagtagtttatttttagtgagacggagaagttggtcggggttagtaatgaaggattagtttgtttttttttcgagaattgaaaggtaaaaggtatttaaggttgggaagagagtagtagttttattaagtaaggaagataaaatgaagtaattagtgagggttttttgggtttatatagggattgaaggaggtgagagaagggagttaaattatattttatttttttatggatgtttataggaaaaatttgtttaattttagttttcgggatttttttaaagtttttaagtttggttattttttttagggtcgaaagtttagtttaatggtaggttttttttattttttattttttttttttttttttttttttcgtatttttgagtttttattatagaagttgatttaagtaatttttgagggtaaaagtatttgagttatatagtaattatgttttagtatatatagtttggtttagatggttgggttatgtgagtgtgtgtatatatattggttagtgtgtaaatataatgtaaatagagtttaatataaatatttagttaatttttgaatgttttgggtaatgagtcgtttttgtatgaagattatgtgtgtggtgggtgtaaatattttatatattgttgatagtatgagttttttttttatatttatatagaaatttttagagttatttttattttattaaaattgtttagttagagtaagtgggttggtttggagaaagtagggggaggtgttttgtttttaagagggatttggagaaattttcgttattgaagtatatgtattaagggattgtgggaaagggatttacggagttttggagatggttttgtattttattttagagggtattgacgttttgtttttagtttgtattagtaaatagtttattgttttagatttgaggtttagatgagtaagaggttttggattttttattcgaggttaggtgtatttagtttttgttagggttttttggaagttaaggttggagatggggttgtaaggagttttttggcggcgggtggaaattggggttagatttaggttttatgtagttagataagtagaatatgggttaggaatttgagtttggtttaagatagtttgtttttaattgagtttttttttttatgaaggtttgggttaggttttatggataggattatcggattagatttttggtttttgggtgggggtttaaggttaggaaatattttgattaggtttagtatttttgtagtgtttttattttgtagatttaatttggtggtgattttggggttttgttcgttaggtttattattattgtgtggtagtttttattttttggagtagattgtgggatttatagaaaagatggggaaaggatgggattaagagttttatgttttcgggataattaggaattaaggatttttaaaatcgagtagttttagtaattttttattttttggagagaggatttttagttgttataaaaagagtgttttgggtttaggaatttaaaattatattatatttgaggaattttaggttttaagaagagaagagattaattagaggttttttaggtatttgtgaggtaaatggttttcgaaatttttaaaggagatttgatagtagttgagtttagttgttattgatgtttaagggagttgcgtagtaagggagagttttttaggagtagtaagggagagttttttaggagaagaaggaagtatagtttgagttgtgttttttgttttttttgtttgtttttgtattatagaaattgttgttgtataggttgtttgtcgtataggtttggtgttgagttgtgaaaagtatgttttgggattttgttatttcgcggaggtggtttgtgtagtatgaggtaaagatttggtttgtttagttaggaagaattgggttggagtttggtgttttttttaatagttatgtaattttgggtaaaatatttatttaaattttagtgtttttttttataaaatagaaatacgtgcgtgtattagaattattaaaataattaaattttttaatttttaagtgtttagtttatagtagatgtttaataatgttttttttttttttttattaaaaaaaaaaaaggaaggaaggaagtaaaaaaggaaagaagaaaggaagggggaaaaaaaatttttagtaataattttttaggatttgattttttaatttagttggttataggtattttttgcgagtatttttcggggttaggcgtacgcgattgtatttattttgttttagttttttggtcgtgggagtgaggtttacgcggttgtcgttgtagcgaatatttaagttttgaaggtatagttggtgggcgttgagatttcgttcggggtttttttaatttttttttcgttttttttaaagcggtttttatacgtttaggaggttttttttgagaaaggtcgtgttgattcgcgaagcggtatcgatttagggatttatttataggttgttcggttggcgtttttagtttttacgcgtttttttcgattggttgatttttttttttttttttttttttttttttttttttttagaaaagtagaaggtagttatcgggttagaggttgtagggttagtttgtgggcgaggtttttttaggtttttgtggagaaacgggaaatttgaggggtaaacgtaggaagcgggttgggttaattgcgggcgatcgaggcgtcgttagcgggtggggagcgagaggggttagtagtcgggaagatttcggtttggagcgtttcgtgttttcgggtttgttggcggcgttgtaagtttaggttttggggcgcgagttaagttttttttgttagttttaaataaaattcgggggagaatgagtcggttagtttgggtatagggtgttttcgattgtcgggcggcgggcggaagcgtaggggttttgatcgtttttagaggtgttgagcgtatagggtagtggttgtagagtttcggcgcgaggttaattcggattatttacgttgggattttagtttgttcggttgtttttagtaataataatagtatgaaatcgagttttaaaaaattttttttcgtatttttttttatgtataagggagaataagtatttttaggtagttaaagaaaaaaaaagggtaggattttaggaaattttaatttttatggacgaggagtgaaggggaattcgttttttgttttttttgtttgtttgtttttagaagagaaaaaaaggaaattcgatatatatttttaaaaatttttttttaataatcgttaaaggttgtgagtgtgagtagagagttaggaaatcgagttttcgttcgcggtgatatcgggtttttgtttttttttttgaagttttcgcgattgttgatcgtgtagagataaaggtcgggttagggttttgtggaatttcgagggaggggcggcggggtcgttttattggttttttttaattttatgtaggggggttaggtgggtttagttgattttcggaataggggttataaggttaggggttgtttttatttttaggtttagacgaggtacggatttgtttttttttattttttcgaaaggtttttgtcgttaaattttttgtattttgtttttattagtattatattgttttatttaaagtttttggaggcgttagggatagtggttttttatcggattcgatttttagaaatggaatcgtgtttaatttttgtggcgattttggttttcgcgatcgttgggttcggttggtcggttagattcgaattcgtgtatcgtttgttttagttgcgttttttaggggcgtttttgtgtttttttcgggtcgcggagatttttttagcgttcggtttcgaattttttgcgtaacgtttttttgttagtcgtacggttttgtagagaaggcgggagagtgtttgtgattttgttttgtagttttcggtgatttaaaaatttaggtcgttgtggaatttagtttttacggtattgtttttgtaggtagtagttttgggtttatatttgaggtcgttttttttatagatatttttgggtgatgcgagtgttgcgtagtttagaatttttggaagtatgagaggaggacgagttcggcggtttgtcggtgcggtgatggagggtttttcggtagttatattgcgcgttttttatatatattttaatagttttggggtttcgggttagcgttgtagtttaaagagattttgtagtcgtatttttttttaggtcgtggtaaattttggtttcgtttttttttattatggtttgtgagggtaggaggttttcgggggtcgatttttttgatttgaatgagttaggtatttttttttattttaagtgggggtgtgatttgaggagataaaggaaggacgatagatttggggagtggggttttgtagttttttgggttcggagcgtattttttttcgttttttttttttatcggtaggatcgggggttttgaaattggagtcgtttatcggtcggcggatgagagataaaggagttcggcggcgtcgaagcgttgattagtagattcggattcggattttttcgcgttttagagtagtattcgaaattttattttttaggtggtatcgacggttgagtagttttttcggtgttatacggtgtttttaggtatagatagtcgtgttcgcgtgtgtattgtgtacgtataagattgtaggatgatgttttgtatgagttttgtattagtttttttgtttttagttagaggtatacgtatacgtgtgtgtatttgttaagtgtttagggataggtgtgtatttttatatatacgtgatgtgtatgtgtatatatttgtagaacgttttagtatttattttataggtacgtatagggttggttgtttttaataagttattattatatttcgtatttatataggtttttttagttttggtatgatttttagaattatttcgggaaatattttttttttaaagtttatagatgaggaaataagtaaaaagaatttaatgggtattcgtttgtatatattgtgagagagatcgaggttagttaaagatttcgtttattgttgaatttgggtgtgttggtcgaatgtgtttatagatgggtttgtttagcgttttaggcgattttaggttcggcgggttttggtttttcgttaggttttttgggagatttattgcgtcgggtgtggggttttaatttttgtgttgataagtattattttttggagttgggtgattttagtgtttagggcgggaagtcgggagttggtcggagtgtcgttgaggcgatttcggcggttttaaggttatggttgattacgcgtaattgggttgtaaagtttggcgggtttcggtttttaaagtagttacgttaggtaaacgtgcgatgaaaggatttttttagtttatttataaatttaggaatttagggttgttggagtagtgaggaaatttttgttgtttcgaatttttagcgtttttacgagattcggagtttataatgtttattttatagaagtgattagtcggaggttagagcggtatagtgagttgtttaagtttaacgttagttgagtggttatagtcgggattggaatttttaattaagtgtgtttggatttttggtttatagtttttttgtttttagtaaggatcgttggtttttttgtttttcgcgcgtttaggagttatttcgttattagttttcgatttttttcgttaagaatgcgaaaattattatagtttttattagtattatttaaaaggtttttatatgtttggaatttgttgtttgaaaataaattttttgtgtgcgttggttttttaattttttttaaggtatttggtttttttttattttttaagtttttgtcgtcgtagagtgaggttgtttaagggttgtagtttgattatatttcgggggtgtttttgggtttttgcgtcgggtttttgtagattgaggtcgttggtttttgggttttaaggtcgtttttatttcgtagaattcgggagttggaagggagttcgcggtttggcgaggtcgtcgttcgggtttacggtttcgaggttgttttttgttggtattgggcgatattattatcgtttttttcggcggtttaggagttgtatttacgtgaggggttcgcgtagagttaggcgattttatttttattgggtttttagagtggttgtcgtatttgtagttattgacgagattttttcgtattttttaattcgagattttttttcgtagatattagaggtttcggtgttcggatttagggataaggtagagagtcggagttttgcgttggtaatttcgtcgttttgcggcgttcgtcgggattcgcggttaattaggtacggttataggcggacgttgggggatttcggggatggttttaggttgtgttcgttttttttatttttcgttattatagtattgattggcgtttacgggtttcg

SEQ ID NO: 136 - DNA, 1394 bp, Artificial Sequence
  chemically treated genomic DNA (Homo sapiens)
cggaatttcggttcgaagtcgagataggagattggatgcgaggtttttttagagttggttttttttaaataatttttaaaatttttagattttaggggtacgtcgaaattttttaaagtagtttaaagaatataacgagagttttaatattttaggtggcggcgcgttggttttttggagcggggcgggacgcggtcgcgcggatttacgtgtataatcgcgcgggacggggttacgcggatttacgtgtataatcgcgggattttagcgttagcgggattttagcgttagcgggattttagcgttagcgggattttagcgttagcgggattttagcgttagcgggattttagcgttagcgggattttagcgttagcgggtttgtggtttagtggagcgagtggagcgttggcgatttgagcggagattgcgttttggacgttttagtttagacgttaagttatagttcgcgtagtagtagtaaaggggaaggggtaggagtcgggtatagttggattcggaggtcgtgatttaggggaaagcgtgggcggtcgatttagggtagttgcggcggcgaggtaggtgggttttttgttttttggagtcgtttttttttatatttgttttcggcgtttttagtagtttttattttggtttttcgcggttattgcgggattcggcgttgtcgttagtttagtggggagtgaattagcgttttttttcgttttcggttttttcgacggtacgaggaatttttgttttgttttatagattttcggttttcgtcgagtgcggtattggagtttgtttcgttagggttttggaattagagaaagtcgttttttggttatttgaagcgtcggatttttatagtgttttttagtttgggcgggagcggcggttgcgtcgttgaaggttggggtttttggtgcgaaagggaggtagttgtagttttagttttattttagaagcggttttcgtatcgttgcggtgggcgttttcgggtttcgatttcgttagcgtcgcggggtagaggtatttggagttcgtagggtttagatttgggttggaaaagtttcgttgattgtaggtaagcgttcgggaggggcggttaggcgaagtttcggcgttttattatatattttcgggttttatgttagttgtattcgcggtattgggtaggaaatggtagggttgaggtcgattttaggagtataagggagttttttattttttgtttatatttgttatttttagttttgtaatttattttagatatatagaaagtaagtaggattggtggggagacggagtttaataggaatattttttagtagtgagtaggggttgtatgggacgcgggaggagtttagaggaggcgcggagagtgttcg

SEQ ID NO: 137 - DNA, 1394 bp, Artificial Sequence
  chemically treated genomic DNA (Homo sapiens)
cgggtatttttcgcgttttttttgagtttttttcgcgttttatatagtttttgtttattgttggaaaatatttttgttaagtttcgtttttttattagttttgtttgttttttgtgtgtttgggataggttgtaaaattggaggtgataaatgtgggtaggaaatggagggtttttttatatttttagggtcggttttagttttgttattttttgtttaatatcgcggatgtaattggtatgggattcggaagtgtgtggtaaagcgtcggggtttcgtttggtcgtttttttcggacgtttgtttgtagttagcgaagtttttttaatttaggtttgggttttgcgagttttaggtgtttttgtttcgcggcgttggcgaagtcgaagttcgagaacgtttatcgtagcgatgcgaaggtcgtttttggggtggggttgaggttgtagttgtttttttttcgtattaaggattttaatttttagcgacgtagtcgtcgttttcgtttaggttgggaggtattgtagggattcgacgttttaggtggttaaagagcgattttttttgattttagggttttggcggggtaggttttagtatcgtattcggcggaggtcgaaggtttgtggggtaggataggagtttttcgtgtcgtcggaagggtcgaggacgaaggagggcgttaatttattttttattgggttggcggtaacgtcgaatttcgtagtgatcgcggagggttaaggtgaaaattgttgggggcgtcgagggtaggtgtggggaggggcggttttagggagtaaggagtttatttgtttcgtcgtcgtagttgttttgggtcgatcgtttacgtttttttttgggttacgattttcggatttaattgtgttcggtttttgtttttttttttttgttgttgttgcgcgggttgtaatttgacgtttaggttggggcgtttagggcgtagttttcgtttaggtcgttagcgttttattcgttttattgggttatagattcgttggcgttggggtttcgttggcgttggggtttcgttggcgttggggtttcgttggcgttggggtttcgttggcgttggggtttcgttggcgttggggtttcgttggcgttggggtttcgcggttgtgtacgtgagttcgcgtggtttcgtttcgcgcggttgtgtacgtgagttcgcgcggtcgcgtttcgtttcgttttagggagttagcgcgtcgttatttgggatgttaggattttcgttgtgttttttggattgttttgggggatttcggcgtatttttaggatttaggagttttggaagttgtttgagagaaattagttttgggagggtttcgtatttagttttttgtttcggtttcggatcggggtttcg

SEQ ID NO: 138 - DNA, 6357 bp, Artificial Sequence
  chemically treated genomic DNA (Homo sapiens)
gtgtggagattgggaaggtgataaggtgaaggtaattgaaggaagagtcgagggggatatggggaaggattttgttttattttttttaagttgaattattgttttttgaaggtcggtttttggagaaattaaagggtttttgtgtgatatagttatgttatatataaatagaattttgaagtttattaatttttgaggttaagtaagagggaatgtaggggttaaggtagaagagaaattaaaattttagagcgttgagtaaagatgttaattagagaaagagaaatttatttgcgatgttaattaataagcggttaattaaaacggtattttgagtgttaattaatcgttttattaagttatagttattattggaataaattgaaattttttcgtttcgttttttgtttttggtgtaggcggggtcgcgtttttagatatcgtgagaggttttggggcgcggaggttgggggtagtttcggttagtttttttagttttttttaggtttatagaatacgttattggataagtgtttaagtagcgatttttggtttagatatatcgttcggggagtaagtagttgcgtcgaagaataatttatttagtagtagttaatatcgacgtttttttttagaaagagttttcgtaaagcggggggatgtgatttgtgggtttttagtaggggtaggaggtagtttagttcgagagggggcgttttagggtttggattttgtatttttattttttggaatatatttaacgttttattttgaaaattttgtttaggttttggttttggtgtcgtttagtaattaggaaagagttggatttgtttttaggtagtaagaataggattgttagttttttgtggttttgtttttcgaggttttatgagaaggggatgggggtgtaagaagggaagagtgaggtggtgtgttgggcgtcggggacgaggacgtacgttagttaagacgtgttttttatttagtttacgcgcgtttttttatttttttggttttttaaaatcggtaagagaattaagatttcgaatttttattttgaggagtttttcgtattttttaattgttaaatttttgttttttattaaattttcgggggagaaatatttggtaataagaagggattgtgaatttaaatgttaattgagtgggtttttttttcgtagttttatttgtttggtagtttttgttgaaattaaatatattcggagcgtttagtgtaatatttttggggtgtcgagtagaagcgtagtaaagagagattttagcggatttttgtttggtttgttttttatcgatttttatagaaaaaaagagaatgttattggaagaagtttttttgcgtggtgggcgatgtgtgggtgggggatttgtggtatggtttacggtgttgtttttgtgtttgcgatgatatacgtatgttttgagttgtgggttcgtttttttggaggtgcgttcgatcgtatttgttggtgggtttgagcgtgtttggggtgttttaggagaattgagagaacggtttttacgtgtaaagttttaaagtattaatatttttattatattattattatttaatataataatatttgttcggttagcggtattaattaggttatattaaaatcgtagtgtgtttttaatggtgcgtaatgtgtttatatttatatttttttttttgaggatgggcggttgtaggttggtaggggaggagagataggtaagcggcgggttggattagggcgtgacgttttttattacgtatataaatatatatagtttattggatgtttgtcgggtgggagtcgtaattttcgcgcggtcgatggggtttttcgttgcgtattcggttttgcgtcgagtattttgtagttttttttcgcgatacggcgttttgaattcggcggattgattttgtttttttttttttttttgtgtgtgtttgcgtttaattggttaggtttttaagatttgggagggttggtgtgaaagaattaaaatatttttaattggagttttttcgtcgagaattggaggtttcgttttttagttcggcgtttttaggattttttttttagagggaattttttttagaaattttagggtgggtttgtaaaagacgttttcgtagagtaggtttcgttagggttttttttttgtttttggtgttagcggtcggttcgggcgtttcgtagatttcggcgaggtagatgttaagttcggagagtgtttttttcgtaggcgtcgtggcgagattattttgaatatgtaatatatttgtaacgtgcgtcgaggtgtgatgtgtgtgttgaaatagggggatgggggaattcgaagtcggattgggaaggcgggggggaggcgtatagaatttataatgtatttcgtaatttaataatttgaatatttatttattaaaagttgttgcgtgatatttatattgagttattagtttttgtttttaattcgggcgaaaacgattgtattgtcgagttatggttgtagcgtatggggacgttgttgttcgcggtcggatagagtttattagttataacgcggaaggtttttgtatttttttgggggcgggaggaaagtattgttagttttgtttgggggtcgagggtaataagtatcgagtttttcgttttacgtagggttagttgtttagtttagcgaagtttttgtgatttggtgcgtgtttttcgtttttttttttttattaaagaagtaaattttttatttattttttttaattcgatcgtttagagttgttgttttttttttgttagatttttttttttcgattagtttgagtatacgattagaattgtttagagagtaggaagtatattgattttagtttgttttgtttatagataggttttgataaggttgttagaatagtcggagaggtttatataattatttaattattaaaattgttagttaggcgggacgcggattcgcgtttcgggttgcgttaggtattttagtattgggtcgcgcgcgtgattgatcggtgttgatagtatcgtaaaataattacggcgaattttttgatgtgtgattttattttaagtttatgttttagagaggtaatcggagaatgagaagggttagtgttatttcggattatttggaatttgcgagaaagggtaaaatgggggaaggagtttcgaggaaaacgggagagatgggggtgtagagagagagggaagaagaaagcgagttatggattgttggagggattgtaagtaattcgttaaattgtgtaagtgattttttttagagttagtatatggtagattgattttgtttaacgtcggttttagttatatttaaaatgatttagcggttattattgcgattggtttaggaattgataggtagttttaggcgtaaggagtatagattttgtttatcggagatgtgttcgtaattgttgttaaatatagttaagtaaatattattagcgaagagttttgttaagagaaatgttaatttaataaatatgtttttttttttcgtttttcgtatggttgtttgcgttttttttagaggtttttttttttgtttttttgttgtttgggttagacgttttaggtatggtgttgattttcgttattttggagtttcgagttgagtttcgggtagaagatgataggttagtcgtggggtaaggaggtcgcggaaacgcggaacggtttcggggagacggaagcgtttaatgagatttattttgtagttcgggtttagtttatttttttcggagattgtcgcggttttcgaattcgggtttaggtttttatgtttcggcggttagaggacgttgcggggattattggggagttgtttttagttagttttttgttttacgtcggaggttttggcgcggtttttttttcgaattagattggcgattttgggttaggttttaaggatcgtttcggttttttcggttttgcggggagaatttgaggaatcgagtttaagatagtcgatttaggttgtttttatttagattttgcgttttcgattcgttggagtgaatttgatattgttaggtttttttttatggtatggagtgaatgaagagggttatagatttttttatttagtatagtttttcggtaggttttggaaatttatagggagtagaagtatagtattttttgaatcgttttttttttttgggtttgtggttatttgaaggtagagttttgtgtttttaagatagtaggttttcggttaagtttggagtttggggttttaatatatttatatagggttggtattatcgtttttttggattaaaggtaggtttttatattttttttaaaggaatagaaggaaggaaaaggaaattaatacgggttatgtttagatagtaggtttatggtaattttttatagttatagagttttaattcgagtatttttttagagaggaaaaatttaaaaaatttttaaaagggggaaagttgggtagattatagtatttattttttatgtttaggtagaaaaattaatttagagggagtaaaggggtaagaaatatgaagagattttttttgggagttgaggagtattttagtttataatttggttaaaggagaaagttattggtttttttttttgatagaggcgtgttatttatttttttagggaatatgatggtttataaatgaagaggttagtttttttgtagtttttttttatagagtgtaaaatatatatcgtttttattagtgtttgggatgtaaagaattttgtttatttaaaagagatattgtatttttaaagttaaatagtattaatgtatgtggcgaattaagtaggtaaataatttatatatggttgttgtatttgaaggaattatttatttttatgtatagtaaattgaagaaataatggtattaatgagttttgtaaaatgtaattgtgaataatgaaagataatattgtattttgtaatagaaagaataaaggtgaaataattagttagtaaagaggaaaagaaagcgagtaatgattaaatgattaaaagttggtagagtgaatttaatgttattgttagacgtagttatttatttataagtgaaagttaggttttaagtatagtgtaattatagttggggttgttagtttgatattaatgtagttagtagaaattttttaattggttttagaggagaaagtgaattagaaaatatattaatattttaaaaaagtatattttgtttaatttttttattttcgaataatatttgaagattaaaatgttttaggtataagaatttaaatgagtaattttgtttttgaaggaaacggttaatgagatagaaaatagattaaagggaaattattagtggatgagagatattgataggtttgttttgttgattggttggtttgttatttgtagtttgtgttttttagttttacgttatgagttaagttgataatatgaaaagatttataaacgtgtagttagaagttatagtttattatttggaaatttaaatgtaaggggagggggtggtagagaaggtatcggcgaggttgggagggagaggtgtgtatcgagggaggaggaggaggaggaaggggaggagggaaaggaggaggaggaggagaaaagaagtttttattttttggtataaaatcggttatattagagaataataataagttattatttgttataaatgtgttatggattgttaaaaaatgtagtttcgaatcgataatattgttcgaattgaagatagtaataaaatgtttaaagttgcggatgtaattttatatgcgttcgggttgatgtgatatgatcgtattagggaaataaagttaagtgtagttaggatttgttagtatagtggtttttgatggaatagttgaggtatatatcgttcgtggtatggatttcggggtcgaacgtttacgattaagatttttgtttttttgaaatgaaatagaaataggggagttgtaggaaaatcgaatcgcgtttagggttaggagtaagataggagtttttagcgaagatttgaatatttagaattggaacgggtaattagtagatagttaggaaaaaataaataaataaataaaaaagtttggatggatttttgtaaataattattaagaaaaataaaaatgaatttttttattagtttgttttggaggtagttagaaataaataattaaagtaagagaggatgaagatttaaataaaataattatgtgtattattaaaataattatatatgtttgtatagatacgtatatattaaggaacgtaatgggggtttttcgtatagttttaggagatgtagga

SEQ ID NO: 139 - DNA, 6357 bp, Artificial Sequence
  chemically treated genomic DNA (Homo sapiens)
ttttgtattttttgggattgtgcgaggagtttttattacgttttttggtgtatacgtgtttgtataaatatatatgattattttaatgatgtatataattattttatttaaatttttatttttttttgttttggttgtttgtttttgattatttttaaggtaggttaataagaaggtttatttttattttttttaatgattgtttatagaggtttatttaggtttttttatttatttatttatttttttttggttatttgttaattattcgttttagttttgaatgtttagattttcgttgaaagtttttgttttgtttttgattttaagcgcgattcggtttttttgtagtttttttatttttattttattttaaaagggtaaaagttttggtcgtgagcgttcggtttcggagtttatgttacgggcgatgtgtgttttagttgttttattaaaagttattgtattaatagattttgattgtatttagttttgtttttttgatacggttatattatattaattcggacgtatgtgaaattatattcgtaattttaagtattttgttgttatttttagttcgaataatgttgtcgattcgggattatattttttggtagtttatagtatatttatgatagataatagtttattattgttttttgatatggtcgattttatgttaaagaatgagggtttttttttttttttttttttttttttttttttttttttttttttttttttttttttttcgatgtatattttttttttttaatttcgtcgatgttttttttgttattttttttttttgtatttgaatttttagataataggttgtgatttttggttgtacgtttatgggtttttttatgttattaatttagtttatagcgtggaattaaagaatatagattgtaagtgataggttagttagttagtaaggtaagtttgttagtattttttatttattaatgatttttttttagtttattttttgttttattggtcgttttttttaaaaataaaattgtttatttaaatttttatgtttggggtattttggtttttaaatattgttcgaaagtgaaaggattaggtaaaatatgtttttttaaaatgttaatatattttttggtttatttttttttttgaggttaattaggaaatttttgttggttgtattaatgttaaattgataattttagttataattatattgtgtttgaaatttaatttttatttgtgggtagatggttgcgtttggtagtgatattgaatttattttgttagtttttgattatttaattattgttcgttttttttttttttttgttagttgattattttatttttattttttttgttgtaaaatgtagtgttgttttttattatttatagttgtattttgtaaggtttattagtgttattgtttttttaatttgttgtgtatgagaatggatggtttttttaagtgtagtaattatatgtaagttgtttatttatttgattcgttatatatattggtattgtttgattttaaaaatgtagtattttttttaaatagatagggttttttatattttaaatattgatgaaggcggtgtgtgttttatattttgtagaaaaaagttgtaggagggttagtttttttatttgtgaattattatgttttttgggaagatagatgatacgtttttattaaaggaggaggttagtgatttttttttttgattaaattataaattagggtgttttttagtttttagaggggatttttttatattttttatttttttgttttttttgggttagtttttttgtttaggtatgaagaatgggtgttatgatttatttagtttttttttttttaaaagttttttgggttttttttttttgggaagatattcggattaggattttatggttgtgaagaattgttataggtttattatttgaatataattcgtgttggtttttttttttttttttttgtttttttaaaaaggatataggagtttgtttttagtttaaggaaacggtgatgttaattttgtgtaaatgtgttggggttttaggttttaaatttgatcgaaaatttattgttttggaggtatagagttttgtttttaaatggttataggtttagggagagggagcggtttagaaaatattgtgtttttgttttttgtggatttttagggtttgtcgagggattgtgttgggtaaggggatttatggttttttttatttattttatgttatgagagagaatttggtagtgttagatttattttagcgggtcggggacgtagggtttgggtgaaaatagtttaggtcggttattttggattcggttttttagatttttttcgtaaagtcggagaggtcggggcggtttttggggtttggtttagagtcgttagtttagttcgggaaagaagtcgcgttaggattttcggcgtggggtagagagttgattgagggtagttttttagtggttttcgtaacgttttttggtcgtcgggatatgaagatttaggttcgggttcgagggtcgcggtaattttcgaggaaggtgggttggattcgggttgtagggtgaattttattgggcgttttcgttttttcgaagtcgtttcgcgttttcgcggtttttttgttttacggttggtttgttattttttgttcgaggtttagttcggggttttaaggtggcgggagttagtattatgtttgggacgtttgatttaagtagtaaaggagtaggaaggagaatttttggaggaagcgtaggtagttatgcggagggcggggaggaaaagtatatttattggattggtattttttttaatagagtttttcgttaatgatatttatttaattgtatttgatagtagttacgaatatattttcggtaaataggatttatattttttgcgtttaaaattgtttgttagtttttaagttaatcgtagtaataatcgttggattattttaaatgtggttaaaatcgacgttggataaaattaatttgttatatgttggttttgaaggaaattatttgtatagtttgacgaattgtttgtagtttttttagtaatttataattcgttttttttttttttttttttttgtatttttatttttttcgtttttttcggagtttttttttttattttattttttttcgtagattttaggtaattcgaaatggtattgattttttttatttttcgattatttttttgaagtatgaatttgggataaaattatatattagaaaattcgtcgtaattattttgcggtgttattagtatcgattaattacgcgcgcggtttagtgttggaatgtttagcgtagttcgggacgcggattcgcgtttcgtttgattgatagttttggtaattaagtgattgtatagattttttcggttgttttaataattttgttagggtttgtttgtggatagaataagttgaaattaatgtgttttttgttttttgagtagttttgatcgtgtatttagattgatcggggaggaggaatttgataaaaggaaaatagtagttttaaacgatcggattagggggagtaggtagaaagtttatttttttgatggggagggaagagcgagagatacgtattagattataagagtttcgttgagttgggtagttggttttgcgtggagcgagaggttcggtgtttgttattttcggtttttaggtaggattggtagtatttttttttcgtttttaagggggtgtagaggtttttcgcgttgtagttgatgggttttgttcggtcgcggatagtagcgtttttatacgttgtagttataattcggtagtataatcgttttcgttcggattagaggtagagattggtggtttagtgtaaatgttacgtagtagtttttaataaatgaatgtttagattgttagattgcgaagtatattgtgagttttgtgcgtttttttttcgtttttttaattcggtttcgaatttttttatttttttattttagtatatatattatatttcggcgtacgttataaatatgttatatatttagagtgatttcgttacggcgtttgcgggaggggtatttttcgagtttaatatttatttcgtcgaggtttgcggggcgttcgggtcgatcgttggtattaggaataggaaaaagattttgacgggatttgttttgcggaagcgttttttataagtttattttggaatttttgaaagaaattttttttgggaagagggttttgaaagcgtcgaattaggaggcgggatttttagttttcggcggaggggttttagttaagagtattttaatttttttatattagtttttttaaattttaaaaatttaattaattgaacgtaaatatatataaaagggggaagggaagtaaaattaattcgtcgagtttaaagcgtcgtgtcgcgggaggaggttgtagggtgttcggcgtagggtcgagtgcgtagcggagggttttatcgatcgcgcggagattgcggtttttattcggtagatatttagtgggttgtgtatgtttgtgtgcgtggtggggggcgttacgttttaatttagttcgtcgtttgtttgtttttttttttttattagtttgtagtcgtttatttttagagagaaaaatgtgagtgtgagtatattacgtattattagggatatattacggttttaatgtggtttaattagtgtcgttaatcgaataaatattattatattgaataatgataatatgatgaaaatattaatgttttggaattttgtacgtgggagtcgtttttttagtttttttgggatattttaagtacgtttagatttattagtagatgcggtcgggcgtatttttaggaaggcgagtttatagtttaagatatacgtgtgttatcgtaggtatagaaataatatcgtgggttatgttataagttttttatttatatatcgtttattacgtaaaagagttttttttaatggtattttttttttttttgtaagagtcggtaaaaagtaaattagataggagttcgttagggtttttttttattgcgtttttattcggtattttaagaatgttgtattgggcgtttcgagtgtgtttggttttaatagaggttgttaggtaggtggagttgcggaaaaaggatttatttaattagtatttaaatttatagtttttttttattgttaaatgtttttttttcgggaatttggtgaaaagtaggaatttaataattaggaaatgcggaaggttttttaaaatagggattcgaaattttaatttttttatcgattttggagggttaggggggtggggaagcgcgcgtgggttgggtgggaggtacgttttggttggcgtgcgttttcgttttcgacgtttagtatattattttatttttttttttttgtatttttattttttttttatggagtttcgggagatagagttataggaggttggtagttttgtttttgttgtttgaaggtaggtttagtttttttttggttgttgagcggtattagggttagggtttaagtagggtttttagaatgaggcgttgggtgtgttttaggaaatagggatgtaggatttaggttttagagcgttttttttcgggttgaattgttttttatttttgttgggggtttataggttatattttttcgttttgcgggagttttttttaggaggaaacgtcggtgttaattgttgttgaatgagttgtttttcgacgtaattatttatttttcgggcggtgtgtttggattagaagtcgttgtttaggtatttgtttagtggcgtattttgtagatttgggagagattgagaaagttgatcgaggttgtttttaattttcgcgttttaaggttttttacggtatttgggaacgcggtttcgtttgtattaaaggtagaaaacggggcggggaggttttaatttgttttagtgatggttgtaatttaataaggcgattgattagtatttaaagtgtcgttttaattagtcgtttgttaattaatatcgtaaatgaatttttttttttttgattggtatttttgtttagcgttttgaggttttggttttttttttgttttggtttttatatttttttttatttagttttaggagttgataggttttagagttttgtttatgtatgatatggttgtgttatataggggttttttaatttttttaggagtcggtttttaaaggataatggtttaatttaggaggggtgaaataaaatttttttttatgtttttttcggttttttttttaattgtttttattttgttatttttttaatttttatat

SEQ ID NO: 140 - DNA, 9739 bp, Artificial Sequence
  chemically treated genomic DNA (Homo sapiens)
atggaagtatagaaatgtatttaataaatatgtaatagaaggataattaatttaatattaaagtgattagagagttaatgttagggttttatgggtatgttgatattttagaatagagaggattgaaggttagagattttgggtaatttgtatattaagaatgtttttaagttattggggggaaagatagagttttttttgttttatataaaggggtagatttaaaattatagttttttaaaatttttaaaaatttttgtaagatttgaagagagttttgttttaaattttagtgtatataatataaatatatattattaatatttataataagagattggaattaaagtgtatattattttttaaagttttttaaaattgtttttaattataaaaaggtaaattaaaaattttttttatgttatagtagtttaaaaggtaaataatggaagtagaaaggagatgtatatttgttgaaatttgttatgtattaggtattttatataatttatttttatttgatttttataataattggtaaggtgtgtgttgtaggatattaagaggttatagattttaggaggttaagaaatgatttaaaattttatatttaatagttggtatagtaaagatttgaagttaagaatatttgtttttaaaaattagttgtatattatgataatatattttaaataaagatgtataaaaagtatttggttttttatagatattatataaaatatgggataatattagtgatatatttaaatttagatattagaaagaagttttttttaatttattttgtaattgtaatttagttgtttattttataggtttttatagtaataattaaatatttttttttttgttttatatgtgtttttaaattgttattaaagatttttggttagtagtttttatattttttggtgttttgttgttaatgtttggtaaatatgggtagttaaggaaaatgtagatggtgttatggaatataaattatgataatatatggtatatatttagttttaataaagtgtgttttttaatttttgggtgttgttttattatttttttataagattatttatttttagggaaggtttagtttttaaaattagggtaataggtttatatgtgttatatggttatttagatgtatagattatgtgttttaatatttttaagtaagtgtatttagtatatgttttttagtattattatgtgtatttatgaattgttttgtttagatggtaagttttttgaggataagtgttatgtttgaaattttattttattaattgtgtatggtagagtaataatgttatttattttgtatatagagatatataatttataaattgtttttttaggtaaattttttaattatattgttatattgtgataattgttatattttttagatgaggtttatataggttaagtaattagttagaattataaattaataggtaatgttttttttttgtttataagagaaagttttttttgttttgtaatattttattgttttttttttttaaggtttttattataaaggttaatgtttattggttttttaataaaagtaattattatttagtatttagtatatatatgtaaggtattgttttaagggttttataaatattaatttatttaatttttttaattattttatgagatagatattatttttatttatattttatagataaggaaattgagggatagagagattaatttgtttaaaattagaggattggtaaatagtagtagtgaaatttgaatttagtagtgaagtatagttttatagtgtgtgtttttaaatatatattattttgtttgaataagagtttataaagatttttatttaggatatatgaggagttgtttagtaagaaaagaagtatgtttatttttttttatttgatgtatttgattatattttaaaatttttttttatgttaatagaattttgtgtattatattaaatttttttgtattgaaggtatatgtaatggttattttgattgatatgtaaaatatttaaaataaaatattttgagatttgaggattttttgttttatgaattagatattaaaaaaaaaattgtttaggtattagaagtgttatatatttatatttgtaagttttttttgggatttttagattttttatataagatttttttttgtttgaaatattttagtgtttatttaatgtttgagtttgaaaattatttaattttttttaatttttttatttttagttattttgtttttaggtatagggtagggtaagtatttgtttttaatatgatgtttaatattttttatgtttttatttttgttattttgaaaatatgttagtaaatatttaaatatattgtaaagatttaaaatttggggtgtgtatatgtatattaataggagttatgaattatgtatattgtaggtttatataaattagattttgaagaataagtattatagtaattaagtgggttataataagatattttatgtgaaatgtaaaaattattttgaataaattatttgtaagttaatatttttattagaatgatatatttattatttttgggtttgtgatattgttttaatgtattttggttaattgttttaatggtatattaagaaattattttaggttttttttttttgttggaatttgtagatttttatttttgtttgaattaaaataatataatattaaaaataattttttattttttaatgtataatattatttttttttgtttagaaatatttaattaaagtaggatataattttagtaattatttttatatagaatgatttttaaattaatagttagttgtatgattaaaaattgggagattgataattaaaataattttaaatgttttgtttatgtgatgaaaatgagtgattttttaatttttttatatatattaaattgattttatagattttttgtattggtgtttaatatagttaagtgtttgaggttatgtaaaataaataattttgagattttattgtaaatgtttgtaatttatgatgtaaattgatttgtgaagaaaaaataggattttatgttgttgaagttaaagaggtattttttagaaattaaaatagttttgaaatttgagtattgtattatattaaagtattattatttgaggatttaaaaaagttataaatttggggaaaaatttaaaatagatgtatattagtttagttttaagtaaaggtattgattttattattttattgtgttttttgtattatagggtttttaatattaatgatgttttaaataattttttttaatttagttttttttagttattgattttgtaatttgggaaggttttgtatgtttaaaagatttggggagtagaggatgggggtgttttttattaattatattaggattattgagttttgatttaaattataagtatgttgggttttatttaaatttaaagtgaattttttagatttttttttgggatggtttggggaattatgagtttggaatttttgtttatatattgaggtgtttgttttagagtttggatattggtattttgggagagtaggttttgtgggagtttggatttgaagggtgagattttatagggttaaggaaagtggtttttgttttttgttagttttgggggagtagatgtaagaggaggtaagggtgttgtgagttttttggatgtattggttttataggttgtgtttgagtggagtattgtgaatggggttaagaaattttggttttttttgttggatttggttgtttttgtgggtttttttgtttattgtgtttttgttgtggtttgatttttgtgggtttttgtgttgaatttatttggtttttattgtatgggatatttttgatttatttatgttgtgttattgagtttttgtattgatatttggtgtttttgttagtagggtttggatgtattgttttttttgattttgggttttttttgtgttttgttgtttggggtagattggttttgagagggagttattattttttttgttttagggtttttagggtttgaatttgtgttgggatttgggttaggattagggtttggagtttggagtttgtttgttaggatttttggttttggtgttgattggagtttgttggaggttataggattatggtggatggtttggttgttttagggtgtattatgtttgtaggtagatgtttattattaaaaattattgatgtttattaattaggagatttgtaaggtttgtgtattgaatatggtttaaattttgtttagtggtttttgaaagttaaaagaaagaaatttattgtttatgtttatgttgaggaatagttttgaatatgagttaagatttgggagagggttaagtgggggtggtggggaatattgttggaggatgtggggttttggtaggggttttatgtattttttagtatgagggtggggggttttaggggatgtttaggatttttttagtttttgtggaaggttttgttattataagagtttgtgtgggaaggaaagtttttgttttggatatggttagggttgagtttttaaagtttttaattatttttatataggtagtatttttgggttttattagtgggattttttttagaagggggttatgatatggggagagagagttttttattatttttaaggttaggttttttttaaatttgattttggtttttattttttaaatttaattaatgaagaagttgttttagttaattttaaataggagtgttagatggggaattttttttttatagtgttttggtttgtttgtttttgtggttttttttttgttttgaagttagtatttgttttgttttagagagggttaatgaattgggattgattgttgattatgttatattaaatttaggttgattttgttttgtaggatttttttttttttttttttaaaagtgtttttagataaagattggaattatagtaaaatgaataatgagagtttattttggggaaggaagttattttattttatgttattttattttttatttgtttttttattaatttggtataattttgtttttatgttgggtggataaaatggagggggttggtggaaatgtgtttagtgttaatgatagttatagagttattttttttattgttttttgattgtggtatgtaagagtagaggtaagtgtttttttaagttggtatatttgagagagtgatatgtattaattaaaagggaaagattattttggatattttaatagtaataggaataaagatgatttgaattttattaaatgaaatgatatttttatttaattgattgtaaagtgtttttaattaataatttggtatttatttaaaaggtttaatagaattggaggtgatatattttgtattgataatatgttatgagataatattttttgtttaaaataatttaatatattagaaaaaaatatgttaaatataaataattttgtttttatggagaataaatagttataaagtttaattgtatattaaagtttagttagaagagtttttttttttttttgtaaattagaaggtaaaataaaaataaaaataaaattttataaatttaggtttgttagtgaattgggatatagattggtttagtttaaggtattttagtttaaatagttatatgaattgaaataaataattaaaagaaaaaaaaaaataaaaaagaaataaataaataaaaaaaaaaggttatttgaatagatatatttttgtgagataaaatgtaaatgttgaaagttagtttatatattatagttaaaataaattttgtttgtgtgtattaatatattttatataaatttagtgtttgtatttagttgggtgttatttaaggtgaatttgatgggatagagagggggaaataaattattgtttttaaataggattttaggaaattaataagaaggaatataagaaaaggggaatggtgggaattaatattgattgagtgtttattgtgtttggtatagtgaggtgttgtatttttattattttatttggtggttttgtttttttttttttttttttatatattttgtttatttttgtttttttaggataatgagtgtaattttttttttttttgattttttttttttgttttttaggattaaagatagggtaaatatatatatatatatatatatatatatatatatatatatatggtaaatatatgatatatatatatggatatatatatattaatttttagatatttttggtattgttttttatagtgaagatgaaaatggagtgagtgtatgggagataagggggtgggaggagatatattattaatggaatataagtaatatgtaaattggaatttattgttagtagtttagatagttttgttataataattttttagagaaattattgtttgtggtatttttttgtgttaatattatttttttttttttttgttttaatattttttttttttttgtttttttatatatggtgggtttaaatttaaagtatttgatttaatgtaaaaggaggtttgttttttttattaaattttttgtgttaatgtgaattttgtagaaaaaggttagttttaaaatttgtgaattttttagttgtgtattttttttattttagttttttaaataagtatattttttttttttgttttgtttttttagtgtatttttaaaaatatatatttaagttggtaattttttttagttttttgagaattgtttgggttgtttttttatatttttaaatgtataaaatattttaattttaaaatttgtttttgttttttggttttttaattttagtttttgttaaatagtagttaagaaataagtttttttttttttttttttttttgtttgttttttgatttttttgtttgtttatttttttattgttaataagatttttttttttatgtaagagtttattgttgtagttttgtggtgagttaaattttgtggttttagtatttttttgtttagtttttttttagatttttttaaatttgtttttataaaatttaattttaggtttttgagtaggaaaatgggtaggagttatggagtttgtgtgttttgtgagatttttggttttgtgtggagtttggttttttgagtttaagatgtgataggggatgagggatggttagtgaggtgggaagagggttggtttttgaggttttaaaggggtaatggagaagtagtggggtgtggagggtgtgtaggttgagtgttgtgggataggtgtgatattggtgttggtgttggtgttatagatttagggttgtggtgtgttttttggtttttagtttgagattggtgatgttggagtttttgttggtggttttggtggttgttgtggttgttattattgaggtggtggaagttgaatttgtggttagtgtggtgagtggtagtttgaagggtggtgttgggaatattatgtagggtgtgtgtgtggttaggtgtggatgtaggtggtggtgtgtgtgtgttatagtgttgtttagttgtagttgtgtttgaatttgaaaggataagggtgttatgttgtaatgattattttagggtgataatagaatagaaatagagtattaatggtgtttagtttggttagagagagagttgggttgtgtttgggtatggggagagggtatttggttgtgtattttgttttgatagtgatttttttagtttgttgttgaatttggggttttatatggatattttagtgttttttgggtttttgaaatttgtttagggtaggtttatttttttggattttgggaatttttttttgtaggaatgtggttgttttttttgggaattgggttgaaatggtatattggaaagattgtgggtgaggatttttattttttttttttgatgttgttatgtattttttattttattattaaaataatggagtattaataagtaaattatgtaattttttaatgttatttagggaagttattttatttttattataataggtataattgtgagttggtatttttaatttttattgttataataattatttagggattttgttaaaatttagattttgatttgtaaggtttaggttggggtttgagattttgaatttttaataattttttagatggtgttgttgttgttggtttaaagattattttttgagtagtaaaggtttttttttaaagttatttttttttttttttttagttatttttttttgtttttaaagttaagtattaggatgttagagttttgtggtattaagagagttaagatttttttaatattgatttttaatttatggttatatttatttgtttttttggtttaagttattggagattgagagttaatttatgatattataggtatgttaagtaggggttttggttgaggatagggaaggttagatattggttgggaaaggattttgtttttaggtttggaaagtggggagtttagagtattgggattttttaggattaaattattgttgtaggttgtttttttaaaatgtatttttaaaggtttttttatggttaagggattgtaaaggtagggtagttttgggaagattaagatttttttttttattagagatgaagttttgtttgtagaaatagatttaaaaataaaagaatgaaaaaataaaagtatgagttgggagtatttgtgtttattttttttttgttagagttatttaatgtgattaagaggtagaaaatatttagaaaagtatttagagggttgttttagaaatattttaggattaatttttgtattggatttgataaaattttaattaaaaggttttttttttttttttttttaagggtaatttttagtgtatttttaaaggattagttattgtttttaggtttttttagggatttttatgaggatagaagggattaggtatttaggtttttaatattgtataggtttttaaagggtagtgggtttattatattattttaaaatgattttttaattatgtagatattgatatttgggtttagagataggtgatgtttaatagtttaagtaaatatttaggtatttttatatttaaaaatagtttgaaattaggttgtatttgtttgttgaaatggtatttttaaagtatttatgttgatataaggtgtgattttataagttttaaattggttggtggtttttatgagaatatttgtaaaaagtataagagaaaaataatgtgaggttaatgtttgtagtattttttagggttttaaagggtataagatagaatgaatttttttgaaaatggattattatttttttaaattgtatttaaaatttaaataaatgtaatttatttttaaattttaggattttattaatagtttttgaagattattaagttaagaattattgttatttttgaggtttttttttttttgttattgtaatagtaatatttattatttttttttttgtttagattattaaatgttttttgtataagaagtatatttttatggagttgatttttttgttttttatatttagttttttgattttgaaattaaatttataggttggagggggaaaaaaaataaaatttagatgttatgattaaaaatttttttaaattataaaagtataaagagaaaagagttgtg

SEQ ID NO: 141 - DNA, 9739 bp, Artificial Sequence
  chemically treated genomic DNA (Homo sapiens)
tatgatttttttttttttgtatttttgtaatttaaaaaaatttttagttataatatttaggttttattttttttttttttttaatttataggtttggttttaaaattgaagagttaaatgtagaaaataagaaaattaattttataaaggtatgttttttatataaggaatatttgatagtttgagtaaagagagaagtagtgaatattattattataatgatagaaaaaaaggaattttaaaaatgataatagtttttgatttaataatttttaaaggttgttaatggagttttaaagtttgggagtaagttatatttatttaaattttggatgtagtttagaaagataatagtttatttttaaaggaatttgttttgttttgtattttttggaattttgaaaaatgttataaatgttaattttatattattttttttttgtattttttataggtgtttttataggggttgttagttagtttgaagtttgtagagttgtattttatgttaatgtaggtgttttaaggatgttattttagtaggtaagtatagtttagttttaagttgtttttaaatatgaaaatatttgaatgtttgtttgaattgttgaatattatttgtttttgagtttagatgttaatgtttgtatagttggagaattattttgagatgatatagtggatttattattttttaaaaatttatatggtattaaaggtttgaatgtttagttttttttgtttttatgggaatttttgaaggggtttgggggtagtaattggttttttaaaaatatattaaagattgtttttagagagagaggaaggaaaagttttttgattaagattttgttaaatttaatatagaggttagttttaaggtatttttaaggtaattttttagatatttttttaggtattttttattttttagttatattaaataattttgatagaagaaaaataaatataagtatttttagtttatatttttgtttttttgtttttttgtttttaaatttgtttttgtaaataaagttttatttttggtaaagagagaagttttggtttttttagggttgttttgtttttgtaattttttagttataaagaaatttttaagagtatattttaaaaggatagtttgtagtaatgatttaattttgggaaattttagtgttttgaattttttattttttaagtttgagggtgaaatttttttttaattagtgtttgattttttttatttttagttaggatttttgtttggtatgtttgtgatgttatgaattagtttttagtttttagtgatttggattggggagatagataggtgtgattatgaattgagagttggtgttagggagattttagtttttttggtgttataggattttggtattttgatgtttggttttggaaataagagagaatgattgaagaaagagggaggggtgattttaaaaggagatttttattatttaaaaggtaatttttgggttagtagtaataatattgtttgggagattgttagaaatttagaattttaggttttaatttagattttgtgaattagaatttgaattttaatgagatttttgggtaattgttatggtaataaaggttagaagtattgatttataattgtgtttattgtggtgaagatggagtaatttttttgaatgatattaaaaagttgtgtagtttgtttgttgatattttgttgttttggtagtggggtaagagatgtatggtagtattaagagaagagggtaagggtttttatttgtagtttttttaatatattattttagtttagtttttaggggagatggttatatttttgtagaagggggtttttggggtttggggaaataagtttattttaagtgagttttggagatttaggggatattggagtatttatgtggaattttagatttagtaataggttgagaaggttattgttggaataagatgtatagttaaatgttttttttttgtgtttaaatataatttaattttttttttggttaagttggatgttgttaatgttttgtttttattttgttgttattttaggatagttattgtaatgtgatgtttttgtttttttaggtttaggtgtagttgtagttggatagtgttgtggtgtatgtgtattattatttgtatttgtatttggttgtgtatgtgttttatatgatgtttttagtattgttttttggattgttgtttgttatgttggttgtggatttggtttttgttgttttggtagtggtggttgtagtagttgttaagattattagtaagaattttagtattgttgattttagattgaaagttaaaaagtatgttgtagttttgggtttgtgatgttaatgttagtattaatgttgtgtttgttttgtggtatttagtttgtatgttttttgtgttttgttgtttttttgttatttttttgagattttgggagttggttttttttttgttttattgattattttttgttttttattgtattttggatttggaaagttagattttatgtaggattagggattttatgaggtatgtaggttttgtggtttttgtttgtttttttatttgagggtttagaattgggttttgtaggagtgggtttgggggagtttggagagagattggataggggagtgttggaattgtggagtttggtttattgtaaagttgtaatgatggatttttgtatagaaaaaaaaattttgttaataatgaaaaaatgagtaaataaaaaaattgaaagataaatgggagagaaaaagaggaagggaatttattttttaattgttatttggtagaagttgaaattggagaattaaggagtaaaaataaattttaaaattaaagtattttatatatttaaaaatatggaaaaataatttagatgatttttgagagattggggggagttattaatttaaatgtgtgtttttaaaaatgtgttaagaaggtaaagtagaaagaagaggtatatttatttaaaaaattaagatgaaaaaagtgtgtagttgggaagtttataggttttgaaattgatttttttttgtgaagtttatgttaatatgagaaatttgatgagagaggtgggtttttttttatgttgaattagatgttttgagtttaaatttattatgtatggaagagtaagaaaagagaaaatattaaaatgaggagagagaaaaataatattaatataaaaaaatgttatagataatgatttttttgagaaattattatggtaaaattgtttggattgttgatagtaaattttggtttgtatgttatttgtattttattgatggtgtgtttttttttatttttttattttttatgtatttattttatttttatttttattatgaaaaataatattaaaagtatttggaaattgatatatatatatttatatatatatattatatatttgttatatatatatatatatatatatatatatatatatatatatatttgttttgtttttgattttggggaataaaagaaaaaagttagaaagggaaaaaattatatttattgttttaagaagatagaggtgggtagaatatgtggggaaaggaaaaagaaaataagattattaaatgaaataatgaaggtatagtgttttgttgtgttagatatagtaggtgtttaattagtattagtttttattatttttttttttttgtgtttttttttgttggttttttgaagttttatttgaagatagtggtttatttttttttttttattttgttaaatttattttaaataatatttagttagatataggtattaggtttgtgtaagatatgttgatatatatgaataaagtttattttgattataatgtgtggattgatttttaatatttgtattttattttataaaggtgtatttatttaagtaattttttttttttgtttgtttgttttttttttgttttttttttttttttggttgtttgttttaatttatgtagttatttaaattgggatattttggattaagttagtttgtattttaatttgttagtaagtttaagtttgtggggttttgtttttgtttttgttttattttttaatttataagaaagaggaaaagtttttttaattgaattttggtatgtggttgagttttgtaattatttgttttttatgaaaataaaattatttatatttgatatatttttttttagtgtattaagttattttaaataaaagatgttattttatgatgtgttgttagtataaaatgtgttgtttttaattttgttaaattttttaaataagtgttaagttattaattgaagatattttgtgattaattgaatgaaaatattgttttatttgatggggtttgagttatttttgtttttgttattattaaaatatttgggatagttttttttttttgattaatgtgtattatttttttgaatatattaatttggaaaagtgtttgtttttgtttttatgtgttgtagttaaggggtagtaagaagggtggttttgtggttgttgttagtgttgagtgtatttttgttggttttttttattttatttatttagtatagaaatagggttatattaaattaatgaaagaatagataagaagtaaaataatataggatagagtaatttttttttttaagatggatttttgttatttgttttgttataattttagtttttatttggggatatttttgggaggaaggaaggagggattttgtggagtgaaattaatttgggtttggtatggtataattgataattagttttagtttgttgattttttttggagtggggtaggtgttgattttggagtgggaaaagagttgtaaaggtgggtaggttagggtattgtggagggaggattttttatttgatatttttgtttagggttggttgaagtagtttttttattggttaaatttagaaggtggaagttagaattgggtttaggaaaagtttggttttgaaaataatgaggagttttttttttttatgttgtggtttttttttggaagaaattttattagtaaagtttaaaggtgttgtttgtgtggggatagttggagattttgaagatttggttttgattatgtttaaggtaggaatttttttttttgtgtgggtttttgtgatgatgggattttttgtaaagattgaaagagttttgagtgttttttgggattttttatttttgtgttggagggtgtgtaaaatttttgttaaagttttatattttttagtagtgttttttattatttttatttggtttttttttaggttttagtttgtatttaaagttgttttttagtatagatgtgggtgataggttttttttttttaatttttaaagattattgaataggatttgggttgtatttagtgtgtaggttttgtgggttttttggttgatgaatgttggtagtttttaataataaatatttgtttgtgggtatggtatgttttgaagtagttaggttatttgttgtggttttgtggtttttagtgagttttagttggtgttggggttgggggttttaataggtaggttttaagttttaaattttaattttaatttagattttaatatgggtttggattttggagattttggagtaggggagatggtggtttttttttggggttagtttgttttaagtagtggagtgtgggggaagtttgaggttaaaggaggtggtgtgtttaggttttgttggtggaggtgttgggtattggtatagaggtttagtgatgtggtgtgggtgggttgggaatgttttgtgtgataggagttaggtgggtttggtgtggagatttgtgggagttgggttgtggtgggagtgtggtaggtggagaggtttgtggaggtagttaggtttggtgagaaaggttaaaattttttggttttatttgtagtgttttatttgggtatggtttgtgggattagtgtatttggggagtttgtggtgtttttgtttttttttgtgtttgtttttttaagattaatggaggatagaggttgttttttttggttttgtggagttttgttttttgggtttagatttttgtaaggtttgtttttttggaatgttagtgtttaaattttggggtaggtgttttggtgtgtgaataagagttttaaatttgtagttttttgaattattttaagaaggggtttgaggaatttattttaaatttaaataaggtttaatatgtttgtagtttgggttgaaatttaataattttaatataattaataaaggatatttttattttttgttttttaaattttttgggtatgtaaaatttttttgagttgtaaaattaatgattgggaaaaattgagttaaaagagattgtttaagatattattagtgttaaggattttatgatataagagatatagtaagatagtaagattggtgtttttgtttggagttgaattgatgtatatttattttgagtttttttttagatttataatttttttgggtttttagatggtaatattttagtataatgtaatgtttaaattttggaattattttgatttttgaaaaatgtttttttggttttagtgatataggattttgttttttttttataaattagtttatattataaattgtaaatatttgtaataagattttaagattgtttattttatataattttaagtatttgattatgttaaatattagtatagaaaatttgtgaaattagtttaatgtgtgtgagggaattaaaggattatttatttttattatataaataaagtatttaagattgttttgattgttagttttttaatttttagttatataattgattattaatttaagagttattttgtgtaaaaataattattgaggttatattttgttttaattaaatatttttgggtagaagaaaatggtattgtatattgggaagtgggggattgtttttaatattatattattttagtttaaatggaaataaaagtttgtaaattttaatggggaaaaaaggtttgaaatggttttttaatatgttattaaaatagttagttaaaatatattaaagtaatattataaatttagaaataataaatatgttattttaatgagaatgttaatttatagataatttatttaaggtagtttttatattttatatggaatgttttattatgatttgtttgattattgtgatgtttgttttttaaaatttaatttatataggtttgtaatatatataatttataatttttgttgatatatgtatatatattttaaattttaaatttttatagtatgtttggatgtttattagtatgtttttaagatgatgaaaataaaaatataaaaagtgttaaatattatattgaaagtaagtgtttgttttgttttatgtttgaaggtaaagtagttgaaaatgaaaaaattaaaaaggattagataatttttaagtttaggtattgagtgagtattgaaatattttagataaaaaaaaattttgtataagaaatttgaaaattttaagaaagatttatagatgtgagtgtataatatttttgatgtttagataattttttttttggtgtttaatttatgaaataaaaaatttttgagttttggggtattttgttttgggtattttatatgttagttaaggtaattattatatatgtttttggtgtaggaaagtttagtataatatgtggagttttattggtatgaggaaaggttttagaatataattaaatatattaaatagggaggagtaaatatgtttttttttttgttgaataattttttatatgttttgagtaaggatttttgtagatttttatttaagtagaatagtgtatgtttaagagtatatattgtggagttatgttttattgttggatttaaattttattgttattgtttattagttttttgattttggataagttaatttttttgttttttagtttttttatttgtaaaatgtggataaaaatagtgtttattttatggaatggttaggaggattaaatgagttaatatttgtaaaatttttagaataatgttttgtatatgtatattaagtattaaataataattatttttattaaaaggttaatagatattgatttttgtaataaaaattttaaaagaaaaaaataataaagtgttgtaagataagaaaagtttttttttgtgggtaagaagaaaatattgtttgttagtttgtgattttggttaattgtttagtttgtgtgagttttatttagaagatgtgataattgttataatgtagtagtgtagttaggaggtttatttagaagagtaatttataggttgtgtgtttttatatgtaagatagataatattgttattttgttatgtatagttaataaggtgagattttaggtatggtatttgtttttgaggagtttattatttgggtaaaatagtttataaatatatatgatagtgttaggaagtatgtgttaaatgtatttgtttaaaggtattaggatatataatttgtgtatttgaatggttatataatatatgtgggtttgttgttttggttttggaaattaaattttttttggaaatgagtagttttataaaggaatggtgaagtgatatttagaggttaagaagtgtattttgttaggattaaatgtatattatatgttgttgtggtttgtgttttatagtattatttgtattttttttggttgtttatgtttattgagtattagtagtaaaatgttaaaagatataaaggttgttgattaaggatttttaatagtagtttgaaaatatatataaaataaagaaaggaatgtttaattattattatagggatttgtaagatgaataattgagttataattatagagtaaattaagaaggatttttttttaatgtttaaatttaggtatattattaatattgttttatattttatataatatttatgaagagttaagtattttttatatatttttatttgggatgtgttgttatagtatatggttaatttttagaggtagatatttttgattttaaatttttgttatattaattattagatgtaaagttttaggttattttttagttttttaaaatttatgattttttagtgttttgtagtatatattttgttaattattgtgaggattaaataaaaataagttatgtaaggtgtttggtatataataggttttaataaatgtatattttttttttatttttattatttattttttaaattattgtaatatagagaggatttttaatttatttttttgtgattagaagtagttttgaaaaattttgggaggtggtgtgtattttaattttaattttttattgtaagtattgataatgtgtgtttatattgtgtgtattggagtttggaataaagttttttttaaattttgtaaaaatttttagagattttgagggattgtgattttagatttgtttttttgtgtagaatagaaaggattttatttttttttttgataatttgaggatgtttttaatgtgtaggttatttagagtttttgatttttagttttttttattttggaatgttagtatatttatggagttttggtattaattttttagttattttgatattagattgattgtttttttgttgtatatttattgaatatatttttatgtttttgt

SEQ ID NO: 142 - DNA, 4313 bp, Artificial Sequence
  chemically treated genomic DNA (Homo sapiens)
gggtttgattttttgagatttggggaggatttttggtagatgtgtgtttagttagaatatttggtaaggatttttttaatgaagaaaaagtggaggaatttagttttagtgagaagaggtttttttattttgttttagatatattggatagagggtatattttgattagagttatgtttagtggttaggaggttagtttagtatttttttttttattatttttgttttgggtgggggggtaatttttttgggagtagttgtgggaattgttgttttttattttagtttagttagtattttgaagtttgtaggggaaggatagtatgtgggatggatattggggaaggagttttgtaaggttagggtgtaatttttaggttttaggtggtttggtaggttatgttgttttggagatgtttgttagattttttaagtttatttagggtttggtagtaatttgttggttgtttttgtgggggtttgggttgttgagtatggtgtagttgtttagggttaattagttttagggtgtttgtgttaggttgtggtttttttgttttttttgtattgagggtatttatggtgtgtaaatgtttttgtatttttagagttgttttattggatgtttttaggaatttatatatttttataaaaatgtattttaaatgatggataggtgagtttggggtaataatgggtgtttggtgggtagataagagtaaatgggaaggagtttgagggaggagggggaagagaagaggaaatagaatttttagttggatattttgataatagttggaaggaaagtttagaaaagatgaagagagaggaggggagaaattaattggggtttttatttttgttgttggatttttaatttttgttttaaatgggttttgttttttggtaaaattagtttaaaggattttaaaataaagaaaatgagatgattggtttgggagttttttaattagagtagagaagttagaggggggtgggtgatttggttttgaagttttagttgaatagttattttttttttttttggtaaaaaggatttttttagaatttttgaggtttttggatttttttttttgtaaatggagttgtatattgtatttttttgtttttttggattgttaagtatgttttatgagggttgttgtttttgggtggaatgtggttgtatgtatgtgtttttttgtatatgtatatatatgtatatttataataagtgtttgtaggaggagtgttttgtgtgttagttttgtgtttaagataggaagttgttgggttattgagttaaatgggagtgatattatttttttttattagtaaggaaagtggattataaaagtttttttgtattttggtagtttatttaatattatttatgtattttgtgtaaggaattgtgggattttgttttatggtaaataatatggaaattttaaaaatagtgatttttttgtgtgtgtttatttatgtgttttggggtgatttggtggggttgttgttgggtgatttatatttttgaattgtgaagtgatagggaaagtgtgggtgagtgtaggagatgtggttgggggtttttttgggtttttgggtttttgtatttggagtgggggatgtggttgttttaaggggaggaggggtggtgggttgtttttgttatttagtggtggttggagtgttatgtgggtgtgtggtgttgtggttattggtttgaggtatgtgtttaggagattggtttgtgatgttatttgagggggttttgttaaaaataagaataaaaatttagagtgaaagtgttttaggttgtgttgagtggtttggaaatttttgagtttgtgtggaggttgaggtggtgagggtggtggatggttggggagtgtgggtggtttagtttggtttggttgggttttggttttgtgttttttatttatgtgatttgggttgtggagttttgtggggtttggtgggggtgtggttgtatgttggtggggtgttttggtttgtagtggggtggtggttgtgaggagggggtttttatgtgtgtgtgggtggtggtgggtgtgttgattgtgggtgtttggtatttttgagggttggttagggtgtgtgggtggggatggttgggtggtggtggtggttggagttggtttgggtgggtgtgagtgttggggaatgtgttgtttgtatgtgtgtagtttttgttttgggtggtttaggtggtggtgttggagtttgaggtggttggatgtggagaggagtggggagtttgggaggtggtttgtgtttttgttggattattgtgattgtttagattttggttgtgtggtgaagttgaggatttggttttgttgaattttttattgtttgggtgagtggggtggtttgtggtgtttttaatttagtttgtggatttaaaggtggttttgtgttgagtgtggttggtgatttgtaggattttagttttggttgtggttgttgtgtatgtttttggaagatttggtggggtgggggtgtgggggtttttgtgtgtgttgtgggagggttgaaggttgatttggaagggtgtttttggagaattagtgtgggatttattgtgaatagtatggaggagaatgattttaagtttggtgaagtagtggtggtggtggagggatagtggtagttggaatttagttttggtggtggtttgggtggtggtggtggtagtagtttgggtgaagtggatattgggtgttggtgggttttgatgttgtttgtggttttgtaggtgtttggtaattattagtatttgtattgtattattaatttttttattgataatattttgtggtttgagtttggttggtgaaaggatgtggggatttgttgtgtgggtgtgggaggaggaaggggtggtggagttggtggtgaaggtggtgtgagtggtgtggagggaggtggtggtgtgggtggtttggagtagtttttgggtttgggtttttgagagttttggtagaatttgttatgtgtgtttggtgtgggtgggttgtttttagttgttggtagtgattttttgggtgatggggaaggtggttttaagatgtttttgttgtatggtggtgttaagaaaggtggtgattttggtggttttttggatgggttgtttaaggtttgtggtttgggtggtggtgatttgttggtgagtttggatttggatagtttgtaagttggtgttaatttgggtgtgtagtttatgttttggttggtgtgggtttattgtatgtgttatttggattggttttttttaggtgagtttgtggggattatgtgttttggtttgttgtggggaggtttgtggagttggggggtggtgttggtgtgggaatttattgggaggaaaatattttgaattttttttgtgtatatgtataaagatttatgtgatattgtgtgaagttgatgttggtttgggtagtggttaggagtttagtggtaggattgatttgttagggggtatagattttttaggattgtagaagggattttttttttttttttgttttttttttttttttttttttttttgttttttttttttgttttttattttgttttggtgtatttttttttagtttttagtttatgttttttttattgtagttttttttggtgggaatgtggtggttggaagatgggtttggaagtgtatatttttatttttttttttatgattttttaatttaggttaggttggggatgtatgttttagtttattttagatttgttttattatttggttattttggttgtgtttggggaagaaaaggtgaggttttttgttgttttgttttttgttttttgggtttgtgttgattggtgggatttaggaggatgtatatagggaaggaggaaaataaaggtgttttttttttttggttttattttgtttgttagtgttagtttgtagtggtggggtttagttttttttttgtatatagtgaggataagggaggtagttgttttttttggtatttgttatttttaaatagaaaggatttttttttagggttttttgggggttgttgatgggaaagaggtagtatttgtaggggttttgtagagatgttggatatatttttttatagatttgtgattttaaaaaattaagtttatgtttttgtagaaattattaattgtattttatgtgggtttgtggttgggaattgttattagaagtggattgtttgattttgagttggtagtggatttttgttgtttttaaatttttaattattttgtgggggttatttgtttagatt

SEQ ID NO: 143 - DNA, 4313 bp, Artificial Sequence
  chemically treated genomic DNA (Homo sapiens)
gatttgggtaaatgatttttgtaaaatagttgagggtttgggggtagtggggatttgttgttagtttggggttaaatagtttatttttaatggtggtttttagttgtagatttgtatggaatgtagttgatgatttttataaggatatggatttagttttttaaaattgtagatttatgaaaaaatatatttagtatttttgtagggtttttgtgaatgttgttttttttttattagtagtttttaggaaattttgagagaaggttttttttatttggggatggtaggtgttgggagggatggttgttttttttgtttttgttgtgtgtaggaagggggttgagttttattattgtgggttggtgttggtaaataaagtggagttaaggggaaagggtgtttttatttttttttttttttgtgtgtatttttttgagttttattggttagtgtaggtttgaggggtagaaggtagagtggtaaagggttttgtttttttttttttgagtatagttgggataattggatggtaggataagtttggggtgggttggggtatgtgtttttggtttggtttgagttggaagattgtagggaaggggatgagagtgtgtatttttgggtttattttttagttattatgtttttattaaaaaaaattatagtgggggagatatgggttaggggttgggaagagatgtgttaaggtggggtggaagatagagaggggagatagggagagaggaaggagagagagagatagagaaagaaagaaggttttttttgtggttttaagaagtttgtattttttagtgaattagttttgttgttggatttttggttgttgtttgggttggtgttagttttatataatgttgtgtgagtttttgtgtgtgtgtgtgggggaggtttgagatgttttttttttggtaagtttttgtgttagtattgttttttagttttgtgggtttttttgtggtgagttgggatgtgtggtttttgtgggtttatttgaagaaggttggtttgagtagtgtgtatagtagatttatgttggttagagtatgggttgtgtgtttaggttggtgttggtttgtgagttgtttgagtttgagtttattgataggttgttgttgtttaagttgtgggttttgagtgatttgtttagggggttgttggggttgttgttttttttggtgttattgtgtagtgagagtgttttggagttgttttttttgttatttggagagttgttgttggtggttgggagtggtttgtttgtgttgggtgtatatggtgggttttgttggggtttttgggagtttgagtttaagagttgttttgagttgtttgtgttgttgtttttttttgtattgtttgtgttgtttttgttgttggttttgttgtttttttttttttttgtgtttgtatagtaggtttttgtgtttttttgttggttgaatttgggttgtaggatgttgttgatgaagaagttggtgatgtggtgtgggtgttggtggttgttgggtgtttgtaggattgtgggtagtattagagtttgttggtgtttggtgtttgttttgtttgggttgttattgttgttgttgtttgagttgttgttggggttggattttggttgttgttgtttttttattgttgttgttgttttgttaggtttggggttatttttttttatgttgtttatagtaaattttatattggttttttggggatgtttttttaaattagtttttggtttttttgtggtgtatatggagatttttgtgtttttattttgttgagttttttgagggtgtgtgtggtggttgtggttagggttgaggttttataagttgttggttgtgtttggtgtggagttatttttgaatttatgaattgggttagaaatattatgagttgttttgtttgtttagatgatgagagatttaatagagttaagtttttgattttgttgtgtagttggggtttagatagttgtagtggtttggtggggatgtgggttgttttttgggttttttgtttttttttgtgtttggttgttttgggttttggtgttgttgtttgggttgtttggggtgagagttgtgtgtatgtaggtagtgtgttttttggtgtttatgtttgtttgggttggttttggttgttgttgttgtttggttgtttttgtttgtatgttttagttggtttttgagggtgttgggtgtttgtggttagtgtgtttgttattgtttgtatgtatatggaggttttttttttgtggttgttgttttgttgtgggttggggtgttttattggtgtgtggttgtgtttttgttgagttttgtagagttttgtggtttgagttgtatgggtgagagatgtgaggttagggtttggttgggttgggttgggttgtttgtgttttttggttgtttgttgtttttgttgttttggtttttgtgtgggtttggaaatttttaggttatttggtgtaatttgagatatttttattttggatttttgtttttatttttaatagagtttttttgagtgatgttgtaggttggttttttggatatgtgttttgggttaatggttgtggtgttgtgtgtttatgtgatgttttggttgttgttgggtgataggagtagtttgttgttttttttttttttaaagtggttgtgttttttgttttgggtgtgggagtttaggaatttggagagatttttgattgtgttttttgtgtttgtttgtgttttttttgttgttttgtggtttaggggtgtgagttatttggtgatagttttgttaggttattttggggtgtgtaggtggatatgtataggaagattgttatttttaagatttttatattgtttattgtggggtgaaattttataattttttgtataaaatgtataaataatattaaatgagttgttgagatataaagggatttttgtggtttgttttttttgttgatggagaggaatagtgttatttttatttgatttggtaatttggtagttttttgttttaaatgtagagttggtgtgtaggatattttttttgtagatatttattgtaagtgtgtgtgtgtgtgtgtgtgtagggaggtgtgtgtatatggttgtattttatttggggatagtgatttttatgaaatatgtttagtgatttgaaagagtgggggaatgtagtatgtggttttatttgtgaagggagaaatttaggagttttggaggttttaaaggaattttttttgttaaggagaggaggggtgattgtttagttaagattttaaaattaagttgtttgtttttttttaatttttttattttgattgaggagtttttagattggttattttgttttttttgttttaaaattttttaaattaattttgttggagagtagggtttatttgaaatgagaattaggaatttaatggtaagggtgggagttttagttggtttttttttttttttttttttattttttttagattttttttttagttgttgttagaatgtttaattggaagttttgttttttttttttttttttttttttttttgggtttttttttatttgtttttgtttatttattaaatatttgttgttattttaggtttgtttgtttattatttaaaatgtatttttatggaaatgtgtgaatttttggaaatatttgatagggtagttttgggggtgtgggagtatttgtatgttatgagtatttttagtgtgggggaggtggggaggttgtagtttggtatggatattttagggttgattggttttgggtagttgtattgtgtttagtaatttagatttttgtagaggtagttagtaggttgttgttaggttttgagtgaatttggggagtttggtaagtatttttgaggtagtgtggtttgttaggttatttggggtttgaaggttgtattttggttttgtgaagttttttttttagtgtttattttatgtgttgttttttttttgtaggttttagagtgttggttgggttgggatgagaaatgatagtttttatagttgtttttaggaaaattatttttttatttaggatgggaatggtgggggaggaggtgttgggttggttttttggttattggatgtggttttggttagagtgtgttttttgtttggtgtgtttagggtagggtggggaagtttttttttgttggggttggatttttttattttttttttattggaggagtttttattaaatgttttggttaggtatatatttgttaggggttttttttgagttttaaaaaattaaattt

SEQ ID NO: 144 - DNA, 16197 bp, Artificial Sequence
  chemically treated genomic DNA (Homo sapiens)
ttttgtaggtggagggggaaagggtttgggggttggtggaggatgtaggagtatgggggagttgtggaaaagatgtggaggtagagttagtaggttttgttaagggataggaggtggttttagagagaaaatgagggattagggatgttttttggggggtggttagttgggtgattgggagaaattgggaaggtgtagattagggtagtaggggtagtgggattgggggtgttttgaagtgaatatgtgaaattgaaggtgtttgttagttttttagtggaggtatttaggaggtagttggaattggaaggaaatggtgatagttgttagtattgtagaggtggtggtggtggtggttatagttggatttttttgggttggtgggaagtgtggaggtgaaggagtagggagtagggggaggtggagaaggaaattttaggtttatatttttattttatttttggttgttatatttttaggaagttttttttgaggttgggatagagggtggggatagtttagtttttttgagagagtttatttttggaggtttgtggtgggagttagggtgtggtggagagggttttttattttttttttagtaagtgggagggaggtgttgggttgaggttgtgttgagtttgagtttgttgtttgggtggatttgttttgtttaagtgtggaggggtggaggtttggttgggttgtagtgtggtgtggagtaggatgttgttttgtgttatggttattggagatgtatgtttatttttttttttgggtttgttgattttgttattttttgtttttggttgtttgtgggtgtttgttatttagattttttttgtgttttatgggatgtaagtttttttttagagtttggttttgtaaaagaggtttggagtttttgttatagattttttttttgggttatggaggatgagaagggttattgagttgagttgtaattttgtgtaatttttgatttttttttttttttgtttttatggtattttattgttttttttttgtttttgaggttttttagaaaatagtgtagaattgtgtagatgtttaggagatgtgaagatgttggagatgtttaggaggtgatggttatgtgaggagaattgtttttaggtgtgtttttggaatgtatggagattttttggtggggaaggggttggggtttgtgttatttagtgtttgtttattgatttttttttgaagagggggtttagggtttttgttgagggagtggggaggtggtgtgggttttttttgggtatatatgggtgtttgttttttttttttttttttttttttttgtatggagagtggagagtggagagtggagagtgatagggaggtagttgaagatttgaattttgaaaggggagttggtggtgaatggtgaatgagatagttatttaggaagtgagtttagttagtttgggaggtggtggagatttatgtttggaagtaattggattaggttttagaatgtgattgttttttgggttttgggggagatgttaaggatgtgtaagtggagggtgtggagataattgggagttagagtttttattatttgggttgggaatgtttttgggtgttttgatggggtggtggtgggggttgggggaggtttttgagaattgtgtggtttggggagagtttatttattgttgagttttgatataggttttgaagttgttgtagtggtttagttttttttttgtttggttttgtgtagtgtggtgttgtagagtttaggttgtgtttttgttttgttgtttagagtttattgtggtggtttattggattatgttggtggggtgattgtagtttttgatttgtgagttgtaaagagttttgaggtttatttataaatttgtgtttttagttgtttttttatgtatttgagttatgttttgggatttggagagtttggggtgttgggtgttgtggaggaggtttggtttttgttgttttttttattttttagtttgtgagggatttgggggaagggggagtaagtttttgttttggaagaaatgtttggaattaaggagtttgatttttggatttgggtgtttgttggatttaggtttttatttttgggttttttggttgaattaagggttttgatagggtttgaggtatttgtatttttaggagataggagtttggttagggtgtattattgggttttgttttgagttagaggatgtagtgtagatatttatttttatattgtttttttatagagtttttttttttttggggtgttgttgggtatagggtaggttgttaggaatttttagtaaaattatgtttgtttagaggtttgtggtttttttagagggtgttggggaaagagaggggatttgatttttttgatttttggaggaaaagtgtttggggttttttagggatatagttttggaagtttattttattttagtttaggttgtggtgaggtggggaggagagttaggagagggggagaggggttttgtgttttgtagaggtttttaattttggaggaaaaagattgggatatatttaagtgagttaaggtttgagttttatgtatttttatttatttggggtggtgtatagttagtttttgttgggtgtgagtatttgattaagggagtaagtggaatgaaaatttagttgggggggtttttattgatataattgttttgtagttgagtttttggatttttgggagatgtggagagtttggggttggtttttgttttgtagagtagattggattgttttaggtgtttggaatgtgtttgtattttgttttttggatttgtgggagatttgtgttttgtaagtttttttttttattttagtttgtttttatttatattttgttggtgagtgtgttattgtgaggtgtttttttttttgggaagggagtttttttttgtgtagatttgtattgtttttttttttgtttggttttgttttttaggggtagtttttgtagaaaggagatttttttttgggttgaagggttattagtttgtagttagtttagttttggattttgggagatgtttattattttgtggattttgatttgaaattttttttggttgtttattgtggagagtgtttttgtagagaggtttttaattgaaggagtttgggttttatattttgtttttaagtttgagtttttagggttgttttgtatgaggtgtagatgaatttgtgtttgtaaataagatagaaaattttaagtgttgtttgattttttttttttggggaatttgtattttgttttgggagtgtgtttagtgttttagtattaaattttttggttggggttggtagagtttagagttttgtttttttttaggtgtggttttttaatatttgtaatttaaatgttgtgttgtggttaaaattagttttggtagtgtgaatagagaattaaaagtaggtagtgaatgagaatagtttgtattttttttttttggtagatggggaggtgtaaattttgaggaattttagggtatttgttttaaatgtgggaaatttttgtgtgtattttgttttttttttttagtttgtgttaatgttttaaatggtgttgagttgtttaattttgttgttattatagaggttgttgtgttttaggggattaattgatgtgagatatataaaattttgtaattttataatataaattatagtatagtttttttggagagggttggaatatttgagtgagtttttgagaggaaaagaggagttttttagaggagaaatagagtatttttataatgtgttttaattgagaaattttgttttattgagtttttttttaagtggaattagaagtgttgggatgagagggaaaggatgggagtgtgtttaaaggtggatagtaggtttttatttttggtgggagtgagattggatggtattttttggaaaggtggtttgggttttggataaggttagaggtaggagtttatgatgtagagatgatatagtgtttttttgtgtgtgagtttatgaaggttattattgaggttttgtgtttgtaaaaggttgttatgttttatataagtttttatatttaatatagggattgattgggtatagggatttttttatattatatatgtaagtatgtatgttaattaaagatgtttgtgttaaagaaatggttaattttgttgaatttagaggaattgattaattatttaattaagtagaggaaatgtttgaatttaatttgtaatttagttgtttttttatataaaattatatatttttatttatatttgatgaatgaaaaaagaaattagtttatgattttaatttaaatatatgtttttaaaaatatattttttttagtttagttagtatataaattaattgagtttttttggttaagtatgatttagttgtgatatttaagagtgggagtggttgtttagatatttttttttttatgtgaaatttagattaatgagttattatttaataagttgtaggtagtttggttgggttggatttagatggtttgagttaaatttagattgtatttgtttaaaattttgtaaatttttagttatgtaaattttatttttaaaaatgttgggaagttattgtataagagtttaagttatattagtttttttgtgattatttgtagtttttggggaaagaatagaagaaaagaaaatgttagtttttgtgaggtggggttggtgttttaggggttttttttgaatattttgttttttttttaaaggttaaaaggaaggtagtggatatatattagaattttttttatttgtgaatggttgtaaggttggagaaggtggttagtgtattttaaggtttattatttttttttgtgtttttttttttgttttggtaggtttagttagtttaagttttgggtgttattttttaaatttttttgttaaattaattttatttatttgattggattatttgagaggtgttatttttttttgggttgttgtgattttgagggggtatttttataagagtttaggtattaggtggtgaaatagtttgtgtttttaaatttgttttttttagggtttttgggagattttagagtgtaggtttgtttggggagttttaggggtgggttttgagtggaagtgggtttattttttataggagtttaaattttataggaataagaatagtagtaaaataggataagagagtaggtagggagttgttaaggaaaggtgatttttgggaaggtaggttatttagaataaggtttttttggtgttggagagttggaagggggagtgggtatagaggatttggtttaggtgtgggggttattagtataagtagagttattttttagatttttttttagaagtagttgttttttagagaaattaggtgagggatagtttttgtatttttatatgttagttttggagatttgtttatttgtttttagttgtttttttttttgggtgagtttgggttaagtattaagttaggatagaagggtggtttttagttggtttttggtttattttgtttttttaatatttagggagtttgggtttagtataggtgtttttttagtgattggggtagaattaggatgtgtaatgtgattgtttttttttttttgttttttggtagagtttttgtttgtgttaatttatttattaggttttgtttgtgttatgtgtgtttttggtaggtttggggtggggaaaggtgaagtgttgggtatgtgagggtttgtgtattttagtttttatgatgtttttggttttttttaggtttgttgttgttgtatttaattttttttttttgggggttattttgaagaagttttagattttagatttagttttttagattttgtttttgagtttgtttggtgggtttgtaggttggtttttttttgtttagaggagagtgtagatatgtaatgtttgtttgttggttttgtttgttttatttttgttttttgtgtttttttgttttggtttttgtttataggttgggttggaatgttagttttaggagttgatggtggttttttgtttgttttggggaaggtgttgtttttttattggttttaattttttgtttggtgtttggggtttggttgtggggtttggtttttagttgagggtgtagggttggttaggtttgttttggttgaggtggagattttgtttttagggattgttgggtgtttttgttttgtgagtaatgagattgttgtgagtgaatggtttttattgagtttatttttttaagtgttattatgttaagttagagaagtgaggtgagtggaggggatgtagaggggttggaaaagttatttttttttggttttgtttttagataaaaatgggagtttggtttggtatttgggtgtttggtgtttttggggtgttttattgaggttttgtttgtaaaattagtgtttgtgttttgaagtgtatggtgtttggaagttgtttttttgtttgttttttttgaggtttttttttgtgtagtgagtttgagaaatatggaggattgttttttgtaagtgggtggttgtgggtgttttttgatttttgggtgaagttagagggaaaatggggtttttgggttagtgttttattttttattttgggagaaattaatgtttggagagggtttgtttgatttgtatagaaaggttgattttgagggtggtggttgtttgggggagaaagtggaggttttgggtttgtgggagtgtggtagttggggttggtattgtagaggagagatatgttattgttttgtatttttagaaagtgtgaggtgttgttttagttggggtaggtggttgaggttggtttttatgtgtgttttttgaagttttttgaaatattttgtggagttttgtgtgtatagaatttagtattgtttagtttttgggtagtttaattttttgtagttttattttagtttttttggttttttgaatggtgattttttttattgtttttttagagttgttttgtgtttgggtttattttggggggtttggtattttttagttatttttttttttatttattttttttttttttatttttttttttattttttattttttttttttttaggagagtgatttatgaatttttttttttttagttaattttagggtttagtttgtagattttgtgagggtaggtttttgtttattggtttgttaggtgttttggaggtgatgttttgttttttagagtttttgttgtagttatgaattggggtttgggttgtaggaaagtatagggttgaagtttagtgttttggggttatttatattgaggtagttagaggtaaagagttttaagaatttagaaaatattttttaggaagttgtttaattggtttttatgggataggtggagttattaatttgggatggttttgtaggaattaaagagtttagggttttttttttttttaatattatgtttaggagatttagagttgttggatttttttttttttgattggtgattattagagtttttagagttgtagaaaattttttttttaaaaaattaagtaagtgttaataagattttttataaatttttattagttttatttttttggggggtaggtagattgtggggtttgattttttgagatttggggaggatttttggtagatgtgtgtttagttagaatatttggtaaggatttttttaatgaagaaaaagtggaggaatttagttttagtgagaagaggtttttttattttgttttagatatattggatagagggtatattttgattagagttatgtttagtggttaggaggttagtttagtatttttttttttattatttttgttttgggtgggggggtaatttttttgggagtagttgtgggaattgttgttttttattttagtttagttagtattttgaagtttgtaggggaaggatagtatgtgggatggatattggggaaggagttttgtaaggttagggtgtaatttttaggttttaggtggtttggtaggttatgttgttttggagatgtttgttagattttttaagtttatttagggtttggtagtaatttgttggttgtttttgtgggggtttgggttgttgagtatggtgtagttgtttagggttaattagttttagggtgtttgtgttaggttgtggtttttttgttttttttgtattgagggtatttatggtgtgtaaatgtttttgtatttttagagttgttttattggatgtttttaggaatttatatatttttataaaaatgtattttaaatgatggataggtgagtttggggtaataatgggtgtttggtgggtagataagagtaaatgggaaggagtttgagggaggagggggaagagaagaggaaatagaatttttagttggatattttgataatagttggaaggaaagtttagaaaagatgaagagagaggaggggagaaattaattggggtttttatttttgttgttggatttttaatttttgttttaaatgggttttgttttttggtaaaattagtttaaaggattttaaaataaagaaaatgagatgattggtttgggagttttttaattagagtagagaagttagaggggggtgggtgatttggttttgaagttttagttgaatagttattttttttttttttggtaaaaaggatttttttagaatttttgaggtttttggatttttttttttgtaaatggagttgtatattgtatttttttgtttttttggattgttaagtatgttttatgagggttgttgtttttgggtggaatgtggttgtatgtatgtgtttttttgtatatgtatatatatgtatatttataataagtgtttgtaggaggagtgttttgtgtgttagttttgtgtttaagataggaagttgttgggttattgagttaaatgggagtgatattatttttttttattagtaaggaaagtggattataaaagtttttttgtattttggtagtttatttaatattatttatgtattttgtgtaaggaattgtgggattttgttttatggtaaataatatggaaattttaaaaatagtgatttttttgtgtgtgtttatttatgtgttttggggtgatttggtggggttgttgttgggtgatttatatttttgaattgtgaagtgatagggaaagtgtgggtgagtgtaggagatgtggttgggggtttttttgggtttttgggtttttgtatttggagtgggggatgtggttgttttaaggggaggaggggtggtgggttgtttttgttatttagtggtggttggagtgttatgtgggtgtgtggtgttgtggttattggtttgaggtatgtgtttaggagattggtttgtgatgttatttgagggggttttgttaaaaataagaataaaaatttagagtgaaagtgttttaggttgtgttgagtggtttggaaatttttgagtttgtgtggaggttgaggtggtgagggtggtggatggttggggagtgtgggtggtttagtttggtttggttgggttttggttttgtgttttttatttatgtgatttgggttgtggagttttgtggggtttggtgggggtgtggttgtatgttggtggggtgttttggtttgtagtggggtggtggttgtgaggagggggtttttatgtgtgtgtgggtggtggtgggtgtgttgattgtgggtgtttggtatttttgagggttggttagggtgtgtgggtggggatggttgggtggtggtggtggttggagttggtttgggtgggtgtgagtgttggggaatgtgttgtttgtatgtgtgtagtttttgttttgggtggtttaggtggtggtgttggagtttgaggtggttggatgtggagaggagtggggagtttgggaggtggtttgtgtttttgttggattattgtgattgtttagattttggttgtgtggtgaagttgaggatttggttttgttgaattttttattgtttgggtgagtggggtggtttgtggtgtttttaatttagtttgtggatttaaaggtggttttgtgttgagtgtggttggtgatttgtaggattttagttttggttgtggttgttgtgtatgtttttggaagatttggtggggtgggggtgtgggggtttttgtgtgtgttgtgggagggttgaaggttgatttggaagggtgtttttggagaattagtgtgggatttattgtgaatagtatggaggagaatgattttaagtttggtgaagtagtggtggtggtggagggatagtggtagttggaatttagttttggtggtggtttgggtggtggtggtggtagtagtttgggtgaagtggatattgggtgttggtgggttttgatgttgtttgtggttttgtaggtgtttggtaattattagtatttgtattgtattattaatttttttattgataatattttgtggtttgagtttggttggtgaaaggatgtggggatttgttgtgtgggtgtgggaggaggaaggggtggtggagttggtggtgaaggtggtgtgagtggtgtggagggaggtggtggtgtgggtggtttggagtagtttttgggtttgggtttttgagagttttggtagaatttgttatgtgtgtttggtgtgggtgggttgtttttagttgttggtagtgattttttgggtgatggggaaggtggttttaagatgtttttgttgtatggtggtgttaagaaaggtggtgattttggtggttttttggatgggttgtttaaggtttgtggtttgggtggtggtgatttgttggtgagtttggatttggatagtttgtaagttggtgttaatttgggtgtgtagtttatgttttggttggtgtgggtttattgtatgtgttatttggattggttttttttaggtgagtttgtggggattatgtgttttggtttgttgtggggaggtttgtggagttggggggtggtgttggtgtgggaatttattgggaggaaaatattttgaattttttttgtgtatatgtataaagatttatgtgatattgtgtgaagttgatgttggtttgggtagtggttaggagtttagtggtaggattgatttgttagggggtatagattttttaggattgtagaagggattttttttttttttttgttttttttttttttttttttttttttgttttttttttttgttttttattttgttttggtgtatttttttttagtttttagtttatgttttttttattgtagttttttttggtgggaatgtggtggttggaagatgggtttggaagtgtatatttttatttttttttttatgattttttaatttaggttaggttggggatgtatgttttagtttattttagatttgttttattatttggttattttggttgtgtttggggaagaaaaggtgaggttttttgttgttttgttttttgttttttgggtttgtgttgattggtgggatttaggaggatgtatatagggaaggaggaaaataaaggtgttttttttttttggttttattttgtttgttagtgttagtttgtagtggtggggtttagttttttttttgtatatagtgaggataagggaggtagttgttttttttggtatttgttatttttaaatagaaaggatttttttttagggttttttgggggttgttgatgggaaagaggtagtatttgtaggggttttgtagagatgttggatatatttttttatagatttgtgattttaaaaaattaagtttatgtttttgtagaaattattaattgtattttatgtgggtttgtggttgggaattgttattagaagtggattgtttgattttgagttggtagtggatttttgttgtttttaaatttttaattattttgtgggggttatttgtttagattatagtaggagtgagttaatttttgggttgttattttgtagaattatgtgtgtatatttttgatgaaatttagattttttagttagatttgaaatttgttttattgtttttgttttttttttttgttaatatttaattaatatataggtttataatgttgggtgaggagatttggttgggttttgtgtggtgtgggagtttgttgagttagtttttaatggtttgggagttgggtagtattgtttggtttggtttggtttggtttagtttagtttagtttaagttgtttatttttatgggttttaaaatatttttgtaagataatgtttttgttttttggtttttttgaaagaaaggggagagagagtttttttggggaggtttgattttgtttttgagatttttaagtatttgttttttgaaagaaaattaagaaaaaaatttaaaaattattattttagggaaatttattgttataaaatggtgtttttttgtgggttgttttatgagtgtattaataagagttttaggattagaagagtttgggggtagagttttggggaagggagtggttggaaatttagatagagatgggttttgggagtaggaggttggggttttttttggagttttgtgttttattttttattattgttttggagggttaattttatttttaaatttgtatttatttttattaaagttaggtttattggtttggagttttgggtgtgagtaagataggtattgagtgtgtatgtgtgtatggggtgggtgtttaagtatagggtgtgtgtttttatgggtggtgagtttgtttatgggttgttttaaaagttgtttttggtgtttttgaggtggtgtttatagattttttttttttaggtttgttttttggagagagtataagatttatttggttatgagggagtgtttggtatttattttgggtttttagtttgttttttattttttgttgggtatagttttagtattttagttgatttttttgatttgggtagggtgtagttttagggtttttaaggagatttatattttttttttttttagtgtgtttggtagttttttggttttgaagggtggggggtttttagttttttttagttatagggatttgtgatgaagttggggttagatgttttttaaagttgatttatatattgtataaattgaaatttagaggtgaggttattattttttgttagtggttttgtttttttttttttttatagggaatgttagggggttgagttttttattattaaaaagaaattgatgatatttttttttttttgtttttttttttttgttttttttttatggatagtaggttttagaagttttatagtgattttgtttaaaatttggggtaggtttatagggagaaggttaggttaggtttataagtttgaattttagttgggaggtatagtggggagggttagaagtggatttggataaggttagttgggttattttgttgtttatagtgaagtagttttatgtttggggaaagggtggtgtagttaatatttttgtagagttaggtttttttttttggataggaaatttgggagatttttagtgggtgaaggatttatttattgtgagtagtttagtgtttttttttattaaggagggaagtatatgtattgatttttttttaaaggaatgaatttgggtttatagagtttttggttgggagttatagaggagtttgggtggaggtagatattttgggttttttttgtttttagggtttatttgtttttgatttttatagtttttggtattttgtggggtatttttatgagggtttttattatagtttttagggtgttttttgtttttgtgattgttttgtagttttttttagtttttttttttttttttttttttagtatttattgttatttttgtttttgaatagagagttttagaaaggattaggaaaaattaggttagaaagtgtggggagttttgtttatatttaggagttttatttttatttagagattttttatttgtggttagtttgtttattaggtttgttttatagttttatttatattatatgtagtttttttttattaagtggtggaggtttgtgttgagtttatgtttagtttgaagtttagttttatatttggtggtttagttttgagtggttttgggtgagttattttttttttggggttttagaatttttatttggtgtttattgggtggtatatttttgggtaatttgatttttttttgtttattgtatttatttaggttttaggttttgaaaattaaagaagaagaatttgaataaagaggataagtggttgtgtatggtttttattgttgagtagttgtagaggtttaaggttgagttttagattaataggtatttgatggagtagtggtgttagagtttggtgtaggagttgagttttaatgagttatagattaagatttggttttagaataagtgtgttaagattaagaaggttatgggtaataagaatatgttggttgtgtattttatggtatagggtttgtataattattttattatagttaaggagggtaagttggatagtgagtagggtggggggtatggaggttaggttttagtttgtgttaaataatgtaataatttaaaattataaagggttagtgtataaagattatattagtattaatagtgaaaatattgtgtattagttaaggttttgaaatattttatgtatatattatttataggtggtataaaatttaaaatatttgattataaaatatttttttgagttttttgtgtttatgagattatgttaattttatgggttttttttttttttgtgaagggggttgtttagggttttatttttttttaattttttaagttttattatatgatattggatatttttttattattttaaaagaagaaaaaattaaaataatttgttgaagtttaaagattttttattgttgtattttatataattgtgaattgaataaatagtttttatttggtttatgatttttgttattttgtttgtgttggtttggtgaggatagtaggaggggtttatattttaagtttggattagttattttaaggttttggggagtttaggggatttggtgggagagaggggatttttagggtttttgggttagttttgggatttggttttgggaagtagtttagtgtattttaggtttgttttgggaagttggttttatgtttattagtagttgtttaggtttgtagttttatttggttttttttttttatttttttgtatttaatttttttttttttttttttttttttttttttttttttttttttttttttttgttttttttttttttttttttttttttttttttttttttttttttttttttttttttttttttttttttttttttttattaagggtttaattgtgtgtatatattgtttgtgtttgtggtttgtgttgttgtttttagttttattgtagttttgttgtaggtttaatttttttgttttgggtattgtttttatgtagaagtgttttgaggttttggggttaaaggtttggggtgtgtggtttaaagtttaagagtggtggggtgattttttttttggtttggttttaggaattttttgtgattttattagttattatgggtgttagttagggttttagaaatgaggttatggtttattgtttttgggtgggtagaaggttttgtagagggagatggtattatttattttttttttttttttttttttttttttattttttttttttttttttttatttttttttttttttggagtggttgtttttgttatagagaatatttttttaagataaatatgtgtgtttatatatatgtttgtatgtatgtgaatatatatatatatatatatatattaggtgtgtttgagtttatagttttgaaatatgtggttattttgttttttaaaagaatttagaattttttaggatttagaagaaggaagaaagtgtgtaaataattattttttattattattttttgtttttttttgttttttaaaatatatattttatttttgaaggtgtggtatagtgtaaattaaatatatttaatatattttttattaagtatttatatatgtatataaataaatatattatttatatataatgttat

SEQ ID NO: 145 - DNA, 16197 bp, Artificial Sequence
  chemically treated genomic DNA (Homo sapiens)
gtggtgttatatatagataatgtgtttgtttatatatatatataggtatttggtgggaaatatattgaatatatttaatttatattgtattatatttttaaaaataaaatgtatattttaaaaaataagaaaagataaaaagtgatgataagaaatgattatttatatattttttttttttttttagattttggaggattttgagtttttttgaaagataaggtagttatatgttttagaattgtggatttaaatatgtttggtgtgtgtgtgtgtgtgtgtgtgtttatatgtatgtagatatatgtgtaaatatatatatttattttggaagaatgttttttatagtagaagtagttattttaagaaaagaaaaaaataaaggaaaaaaagaaaaaaatagggaagaaaagaaaaaggaaaggaagatagatgatgttatttttttttatagagttttttgtttgtttagaaatagtgagttatggttttatttttgggattttggttggtatttatgatggttggtggagttataggaaatttttggggttaagttaaaaggagggttgttttattgtttttgggttttaggttatatattttaggtttttagttttagaattttgaagtgtttttgtatggaggtagtgtttagggtaggagggttaggtttgtggtaggattgtggtgggattggggatagtgatatagattatagatgtagatgatgtatgtatatggttgggtttttggtgaggaggaggaggaaagagaaggaggaggaggaaggaaggaggaggaggagaagaaaaagaagaagaaaggaggagtaggaggaaggaggaaggaggaagaggaggaaaaaggagaaggaggagggagttaggtgtaggagggtgaggagagggagttgggtgaggttgtgggtttgggtggttgttggtgagtatggagttgattttttagagtaggtttggggtatgttgggttgttttttagggttaaattttagaattggtttaaggattttggaagtttttttttttttattaggttttttaagttttttaaggttttgaggtggttggtttaggtttgaggtgtgggttttttttgttgtttttattaagttaatataaataaagtggtagaagttatagattaaataggagttatttatttggtttatagttgtgtgaaatgtagtaataaaaaatttttggattttagtaagttgttttaattttttttttttttggaataataaaaaagtgtttaatgttatataatggagtttaggggattaaaaaaaggtgaaattttaagtagttttttttgtaaaaaagaaaaaaatttataaaattagtataattttataaatataaaaaatttaaaaaaatattttatagttagatattttggattttatattatttgtaaatgatatatatatagaatattttagaattttagttaatatataatatttttattattaatgttggtataatttttatatattggttttttatgattttaaattattgtattgtttagtgtggattgagatttggtttttatgttttttgttttatttgttgtttgatttgttttttttggttgtggtggagtggttgtataagttttgtgttatgaggtgtatggttagtgtgtttttgttgtttgtggtttttttgattttggtgtgtttgttttggaattaaattttgatttgtgatttgttgaggtttagtttttgtgttaggttttggtgttgttgttttgttaggtatttgttggtttggaatttggttttgagtttttgtagttgtttggtggtaaaggttgtgtgtggttgtttgttttttttgtttgggttttttttttttggtttttgagatttgggatttgggtagatatggtggatagagagaagttaggttatttagaggtgtgttatttaataggtattgggtaaggattttggggttttaagagggaagtgatttgtttaaggttatttgaggttgaattgttagatgtggggttagattttggattgggtatgggtttaatgtggatttttattatttggtgagggaggattgtgtgtgatgtaagtgggattatggggtaggtttagtgggtaggttgattataaatgaggggtttttagataaaagtaaaatttttggatgtaagtaaaattttttatattttttggtttggttttttttagttttttttgaggttttttgtttaggaatagggatggtggtaggtgttgagagagaggggaggagagaagattgggaaaggttgtagggtggttatagaagtaggaggtgttttgagggttatgatggggatttttatggggatattttatagggtgttaagggttgtgggaattaggggtaggtgggttttgaggataggaggggtttagagtgtttgtttttatttaagtttttttatgatttttagttaagggttttgtggatttaagtttatttttttaaggaagagttagtgtatgtatttttttttttggtggggaggggtattgagttatttatagtgggtgagttttttatttattggaaattttttaggttttttgtttaggagaggggatttggttttataagggtgttgattgtattattttttttttagatatgggattgttttattgtgggtagtagggtagtttagttgattttgtttaggtttatttttgattttttttattgtgttttttaattgggatttagatttatgaatttgatttggttttttttttgtggatttgttttaggttttggatagggttgttgtaaggtttttaggatttgttatttatggggaaagggtagagggaggagagtagaaggagggaagtgttattagtttttttttggtgataagaggtttaattttttggtgttttttgtgggggaagaagggggtaaggttattggtagggagtggtgattttgtttttgggttttaatttgtgtggtgtatgaattggttttagggagtatttggttttagttttattataggtttttgtggttggagaaggttgggggttttttattttttagggttggagagttgttgggtatattgaggagaagaggaatgtggatttttttggaggttttgggattgtattttgtttaggttaggagagttaattagggtgttggggttgtgtttagtaagaggtgggggatgaattggaggtttagggtgaatgttaagtatttttttatggttaagtgagttttgtgttttttttaggagataggtttggagaaagaggatttgtgggtattattttaggagtattaagggtagtttttaaagtaatttataggtaggtttattatttatgagagtatatattttatatttgggtatttattttatgtatatgtatatatttagtgtttgttttgtttatgtttagggttttaggttagtgggtttggttttggtaggggtaggtgtagatttggagatggggttggttttttggaatggtggtgggggatggggtataaggttttaggagaggttttagttttttgtttttagagtttatttttgtttgggtttttaattatttttttttttagaattttatttttaaatttttttggttttggggtttttgttaatgtatttatgaagtagtttgtaaaaggatattattttatggtaataaatttttttaaaataataatttttaggttttttttttgatttttttttaaaagataaatatttaggagttttagaaatagaattaaatttttttaagaaaattttttttttttttttttttggagaaattaaagaatagaaatattattttgtagggatattttaaagtttatgaagataggtgatttgggttgggttgagttgggttgggttaggttgggttgggtggtgttgtttagtttttgggttgttgggggttggtttagtgaatttttgtgttgtataaagtttggttgagtttttttgtttggtattgtgagtttgtatgttaattaaatattaataaaggaggaagatgagaataatggagtaaattttagatttagttgagaaatttgaattttattagaaatatgtatgtatagttttgtgggatggtggtttaagggttggtttatttttgttgtgatttgggtaaatgatttttgtaaaatagttgagggtttgggggtagtggggatttgttgttagtttggggttaaatagtttatttttaatggtggtttttagttgtagatttgtatggaatgtagttgatgatttttataaggatatggatttagttttttaaaattgtagatttatgaaaaaatatatttagtatttttgtagggtttttgtgaatgttgttttttttttattagtagtttttaggaaattttgagagaaggttttttttatttggggatggtaggtgttgggagggatggttgttttttttgtttttgttgtgtgtaggaagggggttgagttttattattgtgggttggtgttggtaaataaagtggagttaaggggaaagggtgtttttatttttttttttttttgtgtgtatttttttgagttttattggttagtgtaggtttgaggggtagaaggtagagtggtaaagggttttgtttttttttttttgagtatagttgggataattggatggtaggataagtttggggtgggttggggtatgtgtttttggtttggtttgagttggaagattgtagggaaggggatgagagtgtgtatttttgggtttattttttagttattatgtttttattaaaaaaaattatagtgggggagatatgggttaggggttgggaagagatgtgttaaggtggggtggaagatagagaggggagatagggagagaggaaggagagagagagatagagaaagaaagaaggttttttttgtggttttaagaagtttgtattttttagtgaattagttttgttgttggatttttggttgttgtttgggttggtgttagttttatataatgttgtgtgagtttttgtgtgtgtgtgtgggggaggtttgagatgttttttttttggtaagtttttgtgttagtattgttttttagttttgtgggtttttttgtggtgagttgggatgtgtggtttttgtgggtttatttgaagaaggttggtttgagtagtgtgtatagtagatttatgttggttagagtatgggttgtgtgtttaggttggtgttggtttgtgagttgtttgagtttgagtttattgataggttgttgttgtttaagttgtgggttttgagtgatttgtttagggggttgttggggttgttgttttttttggtgttattgtgtagtgagagtgttttggagttgttttttttgttatttggagagttgttgttggtggttgggagtggtttgtttgtgttgggtgtatatggtgggttttgttggggtttttgggagtttgagtttaagagttgttttgagttgtttgtgttgttgtttttttttgtattgtttgtgttgtttttgttgttggttttgttgtttttttttttttttgtgtttgtatagtaggtttttgtgtttttttgttggttgaatttgggttgtaggatgttgttgatgaagaagttggtgatgtggtgtgggtgttggtggttgttgggtgtttgtaggattgtgggtagtattagagtttgttggtgtttggtgtttgttttgtttgggttgttattgttgttgttgtttgagttgttgttggggttggattttggttgttgttgtttttttattgttgttgttgttttgttaggtttggggttatttttttttatgttgtttatagtaaattttatattggttttttggggatgtttttttaaattagtttttggtttttttgtggtgtatatggagatttttgtgtttttattttgttgagttttttgagggtgtgtgtggtggttgtggttagggttgaggttttataagttgttggttgtgtttggtgtggagttatttttgaatttatgaattgggttagaaatattatgagttgttttgtttgtttagatgatgagagatttaatagagttaagtttttgattttgttgtgtagttggggtttagatagttgtagtggtttggtggggatgtgggttgttttttgggttttttgtttttttttgtgtttggttgttttgggttttggtgttgttgtttgggttgtttggggtgagagttgtgtgtatgtaggtagtgtgttttttggtgtttatgtttgtttgggttggttttggttgttgttgttgtttggttgtttttgtttgtatgttttagttggtttttgagggtgttgggtgtttgtggttagtgtgtttgttattgtttgtatgtatatggaggttttttttttgtggttgttgttttgttgtgggttggggtgttttattggtgtgtggttgtgtttttgttgagttttgtagagttttgtggtttgagttgtatgggtgagagatgtgaggttagggtttggttgggttgggttgggttgtttgtgttttttggttgtttgttgtttttgttgttttggtttttgtgtgggtttggaaatttttaggttatttggtgtaatttgagatatttttattttggatttttgtttttatttttaatagagtttttttgagtgatgttgtaggttggttttttggatatgtgttttgggttaatggttgtggtgttgtgtgtttatgtgatgttttggttgttgttgggtgataggagtagtttgttgttttttttttttttaaagtggttgtgttttttgttttgggtgtgggagtttaggaatttggagagatttttgattgtgttttttgtgtttgtttgtgttttttttgttgttttgtggtttaggggtgtgagttatttggtgatagttttgttaggttattttggggtgtgtaggtggatatgtataggaagattgttatttttaagatttttatattgtttattgtggggtgaaattttataattttttgtataaaatgtataaataatattaaatgagttgttgagatataaagggatttttgtggtttgttttttttgttgatggagaggaatagtgttatttttatttgatttggtaatttggtagttttttgttttaaatgtagagttggtgtgtaggatattttttttgtagatatttattgtaagtgtgtgtgtgtgtgtgtgtgtagggaggtgtgtgtatatggttgtattttatttggggatagtgatttttatgaaatatgtttagtgatttgaaagagtgggggaatgtagtatgtggttttatttgtgaagggagaaatttaggagttttggaggttttaaaggaattttttttgttaaggagaggaggggtgattgtttagttaagattttaaaattaagttgtttgtttttttttaatttttttattttgattgaggagtttttagattggttattttgttttttttgttttaaaattttttaaattaattttgttggagagtagggtttatttgaaatgagaattaggaatttaatggtaagggtgggagttttagttggtttttttttttttttttttttattttttttagattttttttttagttgttgttagaatgtttaattggaagttttgttttttttttttttttttttttttttttgggtttttttttatttgtttttgtttatttattaaatatttgttgttattttaggtttgtttgtttattatttaaaatgtatttttatggaaatgtgtgaatttttggaaatatttgatagggtagttttgggggtgtgggagtatttgtatgttatgagtatttttagtgtgggggaggtggggaggttgtagtttggtatggatattttagggttgattggttttgggtagttgtattgtgtttagtaatttagatttttgtagaggtagttagtaggttgttgttaggttttgagtgaatttggggagtttggtaagtatttttgaggtagtgtggtttgttaggttatttggggtttgaaggttgtattttggttttgtgaagttttttttttagtgtttattttatgtgttgttttttttttgtaggttttagagtgttggttgggttgggatgagaaatgatagtttttatagttgtttttaggaaaattatttttttatttaggatgggaatggtgggggaggaggtgttgggttggttttttggttattggatgtggttttggttagagtgtgttttttgtttggtgtgtttagggtagggtggggaagtttttttttgttggggttggatttttttattttttttttattggaggagtttttattaaatgttttggttaggtatatatttgttaggggttttttttgagttttaaaaaattaaattttatagtttatttgttttttgggaaaatagggttggtgagagtttgtgggaagttttattgatgtttatttggttttttggggggagaattttttgtaattttggaaattttgatgattattagttaggaaagggagggtttaatgattttgggttttttgaatatgatattggggggaggaggggttttgagttttttggtttttgtaaaattattttaggttaatggttttatttgttttatgaaagttaattaggtggttttttgagaagtattttttgaatttttgggattttttgtttttgattgttttagtataaatggttttaagatgttgggttttagttttgtgtttttttgtgatttagattttaatttgtggttgtaatagagattttgggaagtagagtgttatttttagggtgtttggtgggttggtgggtagagatttgtttttgtagggtttgtgggttgggttttggggttggttggaggaagaggaatttgtgggttgtttttttggaaaggaggaaggtgagaggtggagggaggaataggagaaagagaaataaatgaagagagagataattagagggtattgggttttttagagtggatttaaatatgaaataattttgggaaagtggtaagaggggttattgtttaaagggttggggaagttgggatggggttgtagaaagttgagttgtttaggggttgggtggtgttgagttttatatatatggaattttgtaaggtgttttaggaagttttgagaagtgtgtatgaggattggttttggttgtttgttttagttgggatggtgttttgtgttttttggggatgtggggtagtggtgtgttttttttttgtgatgttagttttggttgttgtgtttttgtgagtttagagtttttgtttttttttttgaatgattgttgtttttaaggttggtttttttgtgtggattagatgagttttttttggatattagttttttttgggatggaaagtggggtattgatttgggaattttgttttttttttagttttatttaggaattggagagtgtttgtgattatttgtttgtggaggatggttttttatattttttaggtttgttgtataaagaggggttttggagagggtgagtaggaaagtagtttttagatgttgtgtgttttaggatatggatgttagttttgtaaataaaattttagtgaagtgttttggagatattgggtgtttggatgttgagttaggtttttgtttttatttgaaaatgaggttagagaagggtgatttttttggtttttttgtgttttttttatttgttttgtttttttagtttgatgtggtgatatttggaaaaatggatttaatgaaagttgtttgtttgtggtggttttgttatttgtggggtagagatgtttaataatttttgagagtgagatttttattttagttaaagtaggtttggttagttttgtgtttttggttgggagttgagttttgtagttaagttttaggtgttgggtggggaattggggttgataggagagtaatattttttttggggtgagtagagagttattgttggtttttggggttgatgttttgatttggtttgtagataaaggttgaaatgaaggggtgtggggagtaggggtggggtgggtggggttaatgggtggatattgtgtgtttgtgtttttttttgggtgaaggaggattggtttataggtttattgggtgagtttggggatggggtttgggaggttgggtttagggtttgagatttttttagaataatttttggaaggagggggttaaatgtggtagtggtgggtttgaaaagggttaggagtgttgtaggaattggggtgtataggtttttgtgtgtttagtgttttgtttttttttgttttaggtttgttaggggtgtgtgtggtgtgggtagagtttggtgggtgggttggtgtggatagaagttttgttggggagtggggaggggggggtagttgtattgtatgttttggttttgttttgattgttggagaagtgtttgtgttgagtttaagttttttaggtgttggggaagtagagtgggttaggagttgattggggattgtttttttgttttgatttgatatttagtttaggtttgtttggggaggggggtggttgggggtaggtgggtagatttttagagttggtgtgtaaagatgtagaaattgttttttatttggtttttttggaaagtagttgtttttgaaggagaatttgaaggatggttttatttgtgttagtaatttttatatttaaattaggttttttgtgtttgtttttttttttggttttttagtgttaggggagttttattttgggtgatttgtttttttaagaattgtttttttttggtagttttttgtttgtttttttgttttgttttattgttgtttttatttttataaaatttggatttttgtggaaggtgggtttatttttatttaaggtttatttttgagattttttagatagatttgtattttggagttttttgggagttttgggaggggtaggtttgggagtatagattgttttattatttaatgtttggatttttatgaaaatgtttttttaaaattatagtaatttagaagaaagtggtattttttaaataatttagttaaataagtaaaattagtttggtaaaggaatttgaagaatggtatttaaggtttgagttggttaagtttattaaaataggaaggaaaatatagaaaaggataatgagttttgaagtatattagttattttttttagttttgtgattatttatagatggaagaaattttagtatgtatttattgttttttttttgatttttggaaagaaaataagatgtttaaaaggaatttttgaaatattagttttattttatagaggttgatattttttttttttttattttttttttaaaggttataagtaattatagagaggttagtgtagtttaaatttttatatagtgattttttagtatttttggaaataggatttgtgtagttagaggtttatagaattttaggtaagtataatttagatttaatttaaattatttggatttagtttagttaaattatttatagtttgttagatgataatttattagtttaggttttatgtgaggaagaaaatatttaaataattatttttgtttttaaatattataattgaattatgtttaattaggagaatttaattagtttatatattggttaagttgggggaaatatatttttaaaaatatatgtttaagttaaagttatgaattgatttttttttttatttattaaatataaataaagatatatagttttatataaaaaggtaattaaattgtgaattaaatttaaatattttttttatttagttaaatgattgattagtttttttgagtttaataaagttggttgtttttttagtatgagtatttttaattgatatatatgtttatatgtatggtatggggggatttttgtatttaattaatttttgtgttgagtatagaagtttgtgtgaagtgtggtgattttttataagtataaagttttagtagtgatttttgtggatttatatgtggaggggtattgtgttatttttgtattatggatttttgtttttagttttgtttaaggtttaaattatttttttgggggatgttgtttagttttatttttattagggatggggatttgttgtttatttttggatgtatttttatttttttttttttattttagtatttttggttttatttaaagaaaagtttagtagaataagattttttagttagggtatattatagaagtgttttgttttttttttaaaaaattttttttttttttttggaaatttatttaaatattttagttttttttagaaaggttgtgttatagtttatgttatggagttgtagggttttgtgtgttttatattagttaattttttaagatataatagtttttgtgatgatggtaaagttgagtaatttgatattatttggagtattaatataggttgggaggaagaaatgggatatgtgtgaagattttttatgtttggagtgaatgttttagaattttttgggatttatatttttttgtttattaggaaggagaaatgtgagttgtttttatttattgtttgtttttagttttttgtttgtattgttagggttaattttggttgtggtgtaatatttgggttatagatgttagggggttgtgtttagggggaagtgggattttgagttttgttagttttggttagaaagtttggtattaaggtgttgggtatgtttttaggataaagtgtgggttttttaaaagaggaaggttgggtggtatttagggttttttgttttgtttgtagatataagtttatttgtattttgtgtaaagtagttttgaaagtttaggtttgaagataaaatgtggagtttaggtttttttgattgaaaatttttttatgaggatattttttgtagtgggtggttagaaaggattttggattaagatttgtagagtggtgagtattttttagggtttggggttgaattgattgtaggttggtagttttttggtttggaggagaattttttttttgtagaaattatttttggaaaataaaattgagtgaaaagaagggtaatgtgggtttgtgtggaagggagttttttttttggggaaggaggtgttttgtggtggtatatttgttggtgggatgtaggtaggggtagattagggtgagaagggggatttgtggaatatgggttttttgtgggtttgagggatagggtgtaggtgtattttaggtatttagggtagtttagtttgttttgtggagtgggagttggttttaggttttttatattttttaggaatttagaagtttgattgtgggatagttgtgttgatggggatttttttagttggatttttattttatttgtttttttgattgagtgtttatgtttggtaggagttggttgtgtgttgttttgggtgggtggaggtgtgtggggtttgggttttggtttgtttgggtgtgttttagttttttttttttagaattaaaggtttttgtagggtgtagagttttttttttttttttttaatttttttttttattttgttgtggtttaagttaagatgaggtgagtttttagggttgtgtttttaggaggttttgagtattttttttttgagggttgaagaaattaggttttttttttttttttagtgttttttgaggaagttgtgaatttttgagtgagtgtggttttattggggatttttagtgatttgttttgtgtttagtgatgttttaaggggagaggagttttgtggaggggtggtgtgggggtgggtgtttatattatattttttggtttggagtaggatttggtgatgtgttttggttgagtttttgttttttaggaatgtgggtgttttgggttttgttgggatttttggtttgattggagggtttgggagtgggagtttggatttaataggtatttggatttaggagttagattttttggttttgaatgttttttttggagtgaaagtttgttttttttttttttaagttttttgtgggttgggaggtgaagggagtgatagaagttgggttttttttgtagtgtttaatgttttgggttttttgggttttgggatgtggtttgggtgtgtggagggatggttgggggtgtagatttgtgaatgaattttggagttttttgtagtttatagattagaggttgtgattgttttattgatgtggtttaatgagttgttgtaataagttttgagtgatgaaatggaggtatggtttggattttgtggtattgtgttgtgtagggttggatgggggaggggttgagttattgtagtaattttaaagtttgtgttggggtttagtaatgggtgggttttttttgggttgtatggtttttaagggttttttttgatttttattgttattttgttggaatgtttagaggtgtttttagtttaagtgatggagattttgatttttagttgtttttgtgttttttgtttgtgtgtttttggtgttttttttgggatttggggggtgattatattttgagatttaatttggttatttttgggtgtgggtttttattgttttttgggttggttggatttgttttttaagtagttgttttatttattatttgttgttagttttttttttaaaatttaagtttttggttgtttttttgttgttttttgttttttgttttttgttttttgtgtgaggggaggggagggggaggaaggagtggatatttatgtgtgtttgggaggggtttgtattgtttttttgtttttttagtagaggttttgggttttttttttagagggaaattggtgagtagatattaagtgatgtgagttttggttttttttttgttgggggatttttgtgtgttttagaagtgtatttggaagtaattttttttgtgtaattgttgttttttaagtatttttagtatttttatattttttaaatatttgtataattttgtgttgttttttggaggattttggagatggggaggggatgatggggtgttgtgggggtagggaaggagagaggttaggggttatgtaggattatggtttggtttggtgattttttttattttttgtggtttagggaggggatttgtagtgagggttttagattttttttgtaaaattgaattttgggggagggtttgtgttttatgaagtatggggaaggtttaaatgatgaatatttatgagtggttgggagtggaagatggtaggattgatgggtttgggagggaagatgggtgtgtgtttttagtgattatggtatgaggtggtgttttgttttgtattatgttataatttaattaggtttttgtttttttgtgtttgaatagggtgggtttatttgggtggtgagtttgagtttagtgtagttttagtttggtgttttttttttgtttgttggggaagaggtgggaaattttttttgttgtgttttggtttttattgtaggtttttgagaataaatttttttagggagattgaattgtttttattttttgttttagttttaagagggattttttgaaaatatggtagttaagaatagggtgaaaatgtaagtttgaggtttttttttttatttttttttgttttttgtttttttatttttatattttttattagtttagaggggtttagttgtaattattattattgttatttttatggtgttgatgattgttattatttttttttagttttagttgttttttggatgtttttattggaaggttgatgagtatttttaattttatgtgtttattttagagtatttttgattttgttatttttgttgttttgatttgtgtttttttagttttttttagttatttagttggttattttttaggagatatttttgattttttattttttttttagagttattttttgttttttagtaaggtttgttggttttgtttttatgttttttttatagtttttttatatttttgtgttttttattagtttttaagttttttttttttttatttgtaggg

SEQ ID NO: 146 - DNA, 2609 bp, Artificial Sequence
  chemically treated genomic DNA (Homo sapiens)
tgtagattagagatgattatagattttttttagtgtggattaaagggattgaattgaatgttttagtttaatgatttaatttttgttatatttatagggatgtgaattttgattttataagtaggtgtgtatgtgtatttagatatttatataaagttgtgtggagggatgaaaagattaattatttgattgatgaggataggtttgatttttttgattattttagtgtgttagtgtatatttttggttgggtttagtgttttaagaaattttggaattttagttgttaatttttgtttttttattatgattttttaaagatattttatttgtttattggggtgaagagaaatgggattaggtgttagggtggtgggattttgtttagggttttgattttgtgttagggttttagattagttggtttttgaaggtttttttatttattttatataagaggaaataaagattttttagtttaaggttttagggttgttttttgattttggttagtttgtaggaagaggaaataataaaataaaggaattgttaatttgttgggtattatattttttagttttaatttttgattttggattgttagggttattttttttatgttgattttgttttttttaaatgaaaatatgttaataaaagtatattttggatataaaatttaagtatgtattttttttggggaggttagagttgaggtgtattttggaagatgagaattttgtttttatgaattgggtaatatttaggtattgttaggtattttgatagattttttagatattttttttttttttttttatattttttttttattaaaatagttattgttttgaaatttattagaataatgatgttttaaaaataaaggtgtagtaagtatttttttttttgttgttgtgggttgaattatggatgtttgtgggttgtttagttttgatggtttgtagggggtgtgtgttgtagttgtagtatagtttggttatttttagaaagggagttgaatggagggaagtagggagtgtggagggtttgaggtttgtagataaggagaggtgtattttgggatttgggttttttgttgttataatataattgtgttattgttggtattgtttgatttaagtgttggtggtaagtggtgatgttggggttgggtttttagtaattgttgtgttttgggttaggttggttgttttagttattgggatttttttttggatgtttttagggtgataggtgttgtatttattgatgggatagttgtatatttttgaataggtagtggagtttgtttttggtaggtattttagttgtgttgatattaaggttgttatataatagttattagttttttttaagttttagaagtaggttttttttgttttagttatagtggttttagttgttgttatgagtttattttttatttttaagtgtatttttttttttttatttgggtttatgtttgttatatagagagaattatatagggggaattatggttttatatttttgaggggatagatattggttgtgagataggtattatgtagagttttttggtgattgtttgtaggagtgagattttttttggttttgtagttggttaggtgtgtgtgtgtgagggtttttagttgattattgggatgtattgttattttttggtttggtgggttttgggattttttggtttttgtaggaggttattttaggtttttggaggaggtgtttttagttggtggtgttttttgttttgggtttagaggtggatatggttggttgtgttttgttggttttttgtttgtgttgtagtgggttgggagtagttgtgtgatattagatttatagtgttaagatgtgaagtgtgaggaaattgttgtgtttgatttttttttttttaatttttggatttaggaatgtttttagtttttgtgttttatatgtttagttttggttttttttttggtttagaagtttttaaggattgaagggttttgtttagggttttgtatttttgtttgatttttatggtttagaaaagtagggggatatttgaaatgttattttgggataaatattaataaaaaagtaaatggatttgtgtaggggttagttattaattaattaggttgtaaggttatttagggtaaatatagtttaggttgggttgggtgagatttttttatggttgttttttgattgaatttttttttttttggtttaggttttttttaggttgttttggggtaaatattggatgggaagggggtgttgttaatttttttgtggggtttggaggtttttttgtttttaagttttgtagggtagggttggagtgtttaatatttatttttgtttgaattttgggtttgtgtgttgtttttttttgggtttgtggtgttgtgtttgttgttgggtgtgtgttgttgtttttttttgagttggtagtttttgttgtgtggttgaagttttttggaatttttaattggaaattaattttggttttgatagatgtttatgttagaggtgtgttatttatttatattttttgttttattttggaggagatgtggtgagaattttgttgt

SEQ ID NO: 147 - DNA, 2609 bp, Artificial Sequence
  chemically treated genomic DNA (Homo sapiens)
gtgatagggtttttgttgtgttttttttgggatgaggtggggggtgtgggtgggtggtgtgtttttgatgtgggtgtttattaagattaagattagtttttaattaaagattttagagggttttggttatatagtaggagttgttggtttggaaagagatagtgatatatatttaatagtaagtgtagtattgtggatttaggggaaggtggtgtgtaggtttgaggtttgggtgggggtgggtgttgggtattttgattttgttttgtgggatttggaggtgaggaaatttttaaattttgtgggggagttggtggtgttttttttttgtttggtgtttgttttagaatgatttaagaaggatttgagttaaggggggaggggtttggttggggggtggttatgagaaagttttgtttagtttaatttgggttgtgtttgttttgagtggttttgtggtttggttgattgataattggtttttgtataagtttatttgtttttttgttaatatttattttggggtgatattttaaatgtttttttgtttttttgggttatgggagttaggtaggagtgtggggttttaggtagagttttttaatttttgaagatttttgggttgggagagaagttaggattgggtgtgtgggatgtaggagttggaagtgtttttgggtttaagagttgggggagaaggagttaagtgtagtggtttttttgtgttttgtgttttggtgttgtgggtttggtgttgtgtagttgtttttagtttgttgtggtgtgaataaagggttagtagggtgtgattgattgtgtttgtttttgagtttggggtgaggggtgttgttagttgggagtgttttttttgaaggtttaggatggttttttatggagattaaggagttttagagtttgttaggttgaaaagtggtagtgtattttggtagttaattggggatttttatatatatatatttagttgattgtaaaattaaaaaaggttttgtttttgtggatagttattagaaggttttgtgtggtgtttgttttatggttggtgtttgtttttttgagggtgtaggattatagttttttttgtgtagttttttttgtgtaatgggtataaatttgggtgaggagagggaggtgtgtttggggataagaagtgggtttgtggtgatgattggaattgttatggttggggtaggggaaatttatttttggggtttaaggggggttgatggttattgtgtggtgattttggtgttagtgtagttaggatgtttgttagagatgaattttattatttgtttggaggtatgtggttattttgttaatgggtgtagtatttattgttttggaagtatttggagagggattttggtagttggggtgattagtttgatttagggtatagtggttgttagagatttagttttgatattgttgtttattattgatatttgggttggatagtgttaataatagtatggttgtgttgtagtagtagaggatttaaattttaggatgtgtttttttttatttgtaagttttgagttttttgtgttttttgtttttttttatttggttttttttttgggggtagttgggttgtgttgtggttgtggtgtgtgttttttgtgggttgttggggttgggtgatttgtgagtgtttgtggtttagtttgtggtagtgaagaaagggatgtttgttgtgtttttgtttttagaatgttgttgttttagtgaattttaaaataataattattttgataggaagaaagtgtgaaggaggaagagaaggatatttagagggtttgttggggtatttaataatgtttgggtgttatttaatttatgaaaataaaatttttattttttgaagtatattttagttttaatttttttaaaaaagatgtgtatttggattttgtatttgaagtatgtttttgttggtgtgtttttatttaagaaaagtggggttagtgtagagaaggtgattttggtggtttgaagttggaggttggagttgagggatataatatttggtggattggtggtttttttgttttgttgttttttttttttgtaaattgattggagttaggaggtagttttgaggttttgagttgagaagtttttgtttttttttgtgtggggtgggtgaaagggtttttggaggttgattggtttggagttttggtgtggagttaggattttggatagggttttattgttttgatgtttggttttatttttttttgttttggtaggtagatagaatgtttttgggaagttatagtaagaaaataaaaattaatagttaaagttttgaagttttttagggtgttaggtttagttgggaatatatattggtatattgaggtaattgaaaagattaaatttatttttgttgattgggtggttgatttttttgtttttttatgtggttttgtgtgagtatttgagtgtatgtgtatatttgtttataaaattggaatttgtgtttttgtgggtgtgataggggttggattattaagttaaaatgtttaatttagtttttttgatttgtgttggggaaaatttatagttatttttaatttatg

SEQ ID NO: 148 - DNA, 11667 bp, Artificial Sequence
  chemically treated genomic DNA (Homo sapiens)
tgggatttgtgggtgttaattaatgttatggtggtggagagtaaaggggatgaatatagtttggggttatttttggagttttttagtgtttgtttgtggttgtgtttggttggttgtggattttggtgggtgttgtaaagtggtgggattgttagtgtagagttttggttttttgttttgtttttgggtttgagtattggagtttttggtgtttgtggggagaagttttggattgagaaatatgggagggttttgttagtggttgtaggtgtggtagttattttggggatttagtgagaatggggttgtttggttttgtgtgaattttttatgtgggtgtagtttttgagttgttgagggaggtggtggtaatgttgtttagtgttagtagagggtagttttgaggttgtgagtttgaatggtgattttgttaaattgtgggtttttttttagtttttggattttgtggggtagaggtggttttggagtttagagattagtgattttagtttgtaggagtttggtgtagaggtttaagggtatttttgggatgtggttaagttatagtttttaggtagttttattttgtgatggtaagggtttagagggtggagggggattagatgttttaggaggggttagaaagttaatgtatatagggaatttgtttttaagtaatagattttaagtatgtggaaattttttaaatgatgttggtgagagttatgatagtttttgtatttttggtgagggaagttggaggttagtagtgggatggtttttgggtgtgtgggagatagagggattagtgatttttgttgggggtagagggattgtggattaaggatttagatatatttaattggggattttagttttgattgtggttatttaattggtgttgaatttgagtaatttattatattgttttagtttttgattaattatttttgtaaaatgggtattgtgggttttgagttttgtaagggtgttagggatttgagatagtaggaatttttttattgttttagtaattttgggtttttgggtttgtaggtgggttgaaaggatttttttattgtatgtttgtttggtgtggttgttttagagattgaggtttgttaggttttgtaatttagttgtgtgtggttagttatggttttggaattgttgggattgttttagtggtattttggttagtttttgattttttgttttgggtattagggttatttagttttagaagatagtgtttattagtataggaattgagattttatatttggtgtagtgggttttttaggaagtttggtgaagagttaaggtttgttggatttgaggttgtttggggtgttaaatagatttatttatgagtatatttggttaatatatttaagtttaatagtgggtgggatttttggttggttttgattttttttatagtgtgtgtaaatgggtatttattagattttttttgtttgtttttttatttgtaaattttgaaaggagagtattttttggggtgattttgaaaattatgttagaattgaaaaggtttgtgtaaatgtgaggtgtaatgatgatttattagaagtagttagttttgtatgtgtttgtaggatagatgttagaatgttttataaatgtgtgtatatatatattatgtatgtgtgaaggtgtatatttgtttttagatatttgataaatgtatatatgtatgtgtgtatttttggttgagagtaaaggggttaatatagggtttatataggatattattttgtagttttgtgtgtgtatagtatatatgtgagtatgattgtttgtgtttggagatattgtatggtattggaggagttgtttagttgttggtgttatttgggaagtagggttttgggtgttgttttggagtgtgggaaagtttggatttgggtttgttggttagtgttttggtgttgttgggtttttttattttttatttgttggttggtgagtggttttagttttaagatttttgattttgttggtgaggggagggagtgagaaggagtgtgttttgggtttaagaggttgtagggttttattttttaggtttgttgttttttttttatttttttaggttatatttttatttaaaataaagaagggtgtttgatttatttaggttagggaagttggtttttgggagttttttgtttttataagttatggtgaagggaggtgaagttagggtttgttatggtttgggagaaaatgtggttgtagggtttttttgggttgtagtgttggtttggggttttaagattgttaaggtgtgtgtgggaggtgtgtagtgtggttattgaagagttttttattattgtattggtaggttgttgggtttgttttttttttatgtttttaagggttttgagttgtgtagtatttgtattatttagaagtgtttgtggagaaaatgattttaggtgtaagtttaaggttgttgtttgtaaaggtaatgttgtggagattgggttttatagtgatttgggtttttaagttattgaaagttatagggtagggttataaatatttttttgttttttttgtagaattgtgtggttgataggagagtgttgtgtagaaaatttgaggttgggtgttggaggagtttttgtggtttggagaaggtatagaggtgtttttgagaggtgtagttggaataggtgatgtatgggtttggatttggttggttaattgagtttagtggttgtgaaaattagagttgttatagaggttgagtatgattttatttttggggattgggtttggtggggagttattgtttttaatgtttttagagattttaagtaggataatataatgttggtaggagtaaggtgtaaggaatttagtggtagaagttttttgggggggtggggaaaggtagatttgtgttttgtttgagtttgggggtggggatagtttttggttttgtagtttttgttttggggattagttgggtttatttaatttttttatatggggttgaaaggggttaatgggatggttttgttgttttttttttgggattttatagggttttgatttggtttttatttttgtatggttagtagttgtgggggttttaggaaggaggataaaggtttggtgttattgtgggtgggggtttggttttttggttttttgtttatatttatagtttttagtggttgttgggggaagatttttaaaaatatgtgttgaatttttttttttttttttttagaaataaataaataaaaaaggtaaaaggtgaatttttttttattttttgtttatagagattaaagttttttgggattttgttttttttttttttttgattgtttagaaatatttgtttttttttgtatatagaggaaaatgtggggaaaggttttttaaaatttggttttatattattattattattaaggataattgggtaggttgaggttttaatgtggatgatttgagttggttttgtgttggggttttgtagttattgttttgtgtgtttagtatttttgggggtgattagggtttttgtgtttttgtttgttgtttggtagttgagagtattttgtgtttagattggttgatttatttttttttgaattttgtttagagttggtaagggggatttagtttgtgttttaagatttgggtttgtagtgttgttaataggtttggggatatgaggtgttttaggttggggtttttttggttgttggttttttttgttttttatttgttggtggtgttttggttgtttgtaattgatttaatttgttttttgtgtttgttttttaggttttttgtttttttataaaggtttaggggagttttgtttataggttgattttgtaatttttggtttggtggttattttttgtttttttgaaaaagaaaaggaaaaaaaaaaaaaaaaagaaaaaattaattagttgagggaggtgtgtgaggattggaggtgttagttggatagtttatgagtaggtttttgggttggtgttgttttgtgggttagtatggttttttttagagaaaattttttaaatgtgtgaagattgttttgggggaagtgagagggaggttggaggagttttgggtggggttttagtgtttattagttgtgtttttagggtttgggtgtttgttgtaatggtaattgtgtgagttttatttttatggttaaggggttagggtagggtggatgtaattgtgtgtgtttggttttggaaggtgtttgtagggggtgtttgtggttagttgggttaggaagttaaattttagaaagttattattaaaggtttttttttttttttttttttttttttttttttttgtttttttttttttttttttttttttaataggggaagggaaaaaatattattgaatatttattataaattgggtatttaaaaattagaaaatttaattattttaataattttgatatatgtatgtatttttgttttatagaggagaatattgaaatttgaatgggtattttgtttaaggttatatagttgttaaagaggatattaggttttaatttagttttttttgattaaataggttaggtttttgttttatgttgtataggttatttttgtgaagtgataagattttagaatatgttttttatagtttagtattaagtttgtgtggtaaatagtttgtgtagtagtagtttttgtggtatagaaataaataaaaaaggtaaaaggtatagtttagattgtgtttttttttttttttgggaggtttttttttattatttttgggaggtttttttttattatgtagtttttttgagtattagtggtagttaggtttagttgttgttaagttttttttaaaaattttggaggttatttgttttatagatatttggaagatttttggttggttttttttttttttaggatttgagattttttaaatgtaatgtaattttgggtttttagatttaagatattttttttatgatagttgggagttttttttttagaaagtggaaagttgttaagattgtttggttttaagaatttttaatttttggttgttttgaaggtatggggtttttagttttattttttttttattttttttatgggttttatagtttattttaagaagtaggggttgttatatagtggtggtaggtttgatgggtagggttttagggttattattaggttagatttgtagaatggggatattgtagggatgttgagtttgattaagatgttttttggttttagatttttatttagaagttaggagtttggtttggtgattttgtttatgaagtttggtttagatttttataaagggaagagtttagttgagagtaaattattttgggttagatttagatttttggtttatattttgtttgtttggttgtatgaagtttgggtttggttttaatttttatttgttgttagggggttttttgtagttttatttttagttttggtttttaggaaattttggtaaaggttggatgtatttaattttggatgaaaggtttagggttttttgtttatttaagttttagatttggagtagtgaattatttattgatgtaagttggaaataggatgttaatattttttggagtagggtataggattatttttagaattttgtaggttttttttttatagttttttggtgtatgtattttaatggtgaagatttttttaggttttttttgagaataggatatttttttttgttttttttaaattaatttatttattttgattgggtaattttagtgaggtggaggtgattttaagaatttttgtgtaaatgtgaggagagggtttatattgttagtagtgtgtgagatgtttatatttattatatatataatttttatgtaagaatgatttattatttaggatatttagaaattggttgggtatttgtattaaattttatttatattgtatttatatattggttaatatatatatatatatttatatggtttagttatttaggttagattgtatatgttaaggtataattgttatataatttaaatatttttgtttttaggaattgtttaaattagtttttataatagaaatttaaaagtgtgaagagggagagaagagaaaggaaatgagagatgaagaaagtttgttattgaattaaatttttggttttggggaaaatgattaaatttaagagttttggagaaattttgagggttggagttagatagattttttttgtgggtatttatggggaagtggggtatgatttggttttttttttttattttttttaatttttgtgtagatttaggaaatttttattgattgttttattttgttttttttatttggtgaggttgttgttttttttttagttttgggtgttttttgttttttagtttttggggaggagataggttggttttttattgttggttttggttaatttttttgttttattggaggtgggttgttatttgtttattagggtttggttttggaagttttttttttttgttttttttgtttgagatggtagttgggggagtgttgatagttagttttagaatagggagtttttgtttgatgaagtaaaggttttgtttatattattttattttttagtaagttaggaatatatatttataaatgtatatattattaatgaggtatgaatgttatatatattgtggttttagtaagtattttttaagtgttagttatatgattattataatgttaaaaatatatgtttattttgtaggtgaatgatagatatatatattttttattttgttattaatatataattgatattgtatatatatatttgtagtagatatagattatataattatttgtttatgggttaaatttttatgttagataaagtataaatagatatgtatatagtaggttgttttttgttttgtaattttttttagttagatagtggagtagttgggtattaaaggtatttagatattaggtttgattagtttttagggttttttgttttagttgagtttttttttttattttgtttttgttggtttttggtaagttttagttttagttttgaggtgatgttttttgagaatttttgtggtttggttttttgttttgtagttttttgtaggatgtttgtggggggtggggggtattttgagtagaagttatttgggtttaattatatataataggatattattttgaggtttttattgtttgattattggagggttgaagtgagaggtttgtaggtttatttttgtggtgtaaaattgtttttggtttattagttggtttggatttgttgttatattgttggttaggttttgagatagatggggggggggtagtgagggttgggtgtggggtttagttttagttgagtagtagtttgtaagaattggtggatttattttattagaagttggaagttatttattttattagaagagtgaaagttgattattttttaatttgtttgggagaattagattgtaattaggttaaatgtttgtgtgtttgtgtggaagtatggattttaatttgttatttggggattttagtaaaggaagagagagaaagaaaaaagattaaatttttgtagttgtgaagtatgtttaatttttattgaaatttttaaattttttatttatattttaaggtaaatgaattttgattattaaaaataataaagtagttattttttatatttgtatagaggttagtagtttgtagtgtatttttataattagaattttatttattaatgtttggaataaatttttggttgttatagttgatttaaaattgaaaagtttgagaataataataaaaatatagttagtttatatatttagtataattgtgtatgaggtagaatataaatttgaataggtataaaaataaattaagttttatttatagttgtgttttgtgaatgaattatggtagaaaaagtttttttgttgatgttaaatagttgtaatgggttagtgatgatatagaaaataaataattttaggaaaataaagtagtagtgatagttataaatgtttgttattttggttgtttttaatttttgtttaatttattttgaaaaagataaaattttgttgaaaattttttttttttaattagttgttgaattaaggagtgatagaaataaagaagtttgtgttaaaagaaggaatataaaatttatttgggaattgataaggtaaaaaataaaaataaaataaaaaaatataataaaagtgttttagttttttttagaaaatttggttttttaaataataagttatagtataattaggtttatggtttttgggttgggttggttttgggttataagattgtttaggttggttgttgttgggttttatattttttttttttaaggtgggagaagtaggaggtttgaaaaataaaaagtagggaggatgagttgttttagtagtgtgggttaggtaggtagtgatttttttgtttttaggatttgtattgaaagatttggggatatttgtttttgatttttttttttagatagggagagggtgaaatttttttaattggtagatgaaattattttttattggatatatttttttaattttgaatatagttttttgaaggtttaataaaaattttaatgtaaattttttagaagagaagatgaggaatattaaagtttttgatttttatatttggatttagtaaattttaaggttataatatttttttggttgtttggtgaatttttttttttttttttttttttaaatatttttttaaaaagttttattgattttttaaataaaatattagttagttgttggggtttggaggtgtttgaagtgatgggattgatagtggaggaaatgtagtttttttttgtgtttgtttgtggtgtaaattgagtataggttgtggagttaggttgttttggtttttgttgggttttaatttttgttttgtttagtgggttttgtggtaagtggtttttgaatagttttaagagggtttgtggagtaaatatatgtattggtttgttttttttttgggtagtgtggttttgttattagttttgtttggtgtgtttagttatggattgtatggtagttgggtggggaatgtggagagtgagtgtattgatttgtgagagaaggttaagaggtttgtgttgttgatgtttggttgtatttttgttttgggttttttttgtggtgaatttgggtaggagatgttggggttttggaaagagatgagtttagtagaaagtgtgtagagaggtagttttaggttaggggagtgtaaggttatagaggttagggaggtgagtataggaggatataaattgaggggataaagaggagtgataggagtttaggaaagtgaaaaagtatagagggattttgggtgttggttttagaggtgggtttagagggtgtgaggttaggttggtggtggtgttgttggttgtgattggggttggtgttgtgtgtttttgtatttttgtatttgtttgtattggtatgtggtgggtttttagagattgaggtgtgaatgtagtgtgttggttttgttgttgtggttttagtaagagtaatgtattatggtgagtttgggttgttgggtataagtgaattgtaggtttggtgtattggtgggtgtgggtgttgggggtgtggtggtggttgggttggtagggttgagttggtttggtggtggtgtggtggttttgtggtgtggtggggtaggtggtggtgtggtggttgtgtgtagatggtgtgtgtgtggatgtgggtgggggtgtggtggaggtgggggtgtggttggtgggttttttaggttattgtatgagtttattatgttggggggtagtgttatgttttgtatgtgtgtgtatggtttgtatgaggtggttgggtttgttagttttttgattatagtggttgtgttagggttattggggtttgtggttgtagttgtagttgttgtagttgttgtggttgttgttatttggtaggaggtatagggtatgggtgagggaggttgtggtagtggttatgagttgttgaggaagttagattgtaggtatttggggggtgttaggtagttgtagttgttggttttggtgtttgttatgttgtatttgtttgtggtgtttttggttttgaagagttttttgttgggttggaagtgtgtgggtggtggttggaagggtttttttatgtggtggtggtgttggtagttgttttttttgaatatgtttttgtaggttgggtttagtgtttagtagttgtttttgtgtttgttgttgtttttgtgtggtattttgatgaagtatttgttgaggttgaggttgtggtggatgttattttgttagttttttttattttttttgtagaatgggaattttgtgatgatgtattggtagatgttggatagtgtgagttttttttttgtgtttttgtggattgttatggtgatgagtgttatgtatgagtatgggggtttttgtgttgggtttggtttttttggggttgttttgttgttatttttattgtttttgtttgggtttggtggtggtttttttggttttttgattgtgtgattggtttttggggttagtagggtttttgttgtgtttttgggtttggggtagttggttattatgataaagttggtgtgttgtggttgggttgtttttgttttttgttttaggtgttggtgtggtaaagagttggggtgtatgagtttgtttatggttaagttttaaatttttggagattgtggatgttgtttgtgtttgtttgttggaggtttgttgttgttttttttttttttttttttttttttagggagtggttggtgggagtggagtttagtttttggttatggggagtttgtttaatagagaggggttttggttttgttgtttttttttgtttaggttagtttttgttttggtgggtttttttttttgtgttttttttttttttttgttttttggttttttgaagtatgatttgtgtttttggtggagttgttttttggagtttttagtgtgttaggagttttgttttgttttgatttgtatgggttttattgagttttgtttgtgttaggtgtttttgtttttatagtggggtggttagttgtgtatgggtgagtttatttttaagttattttttgtaaatgttttgtatagtttggattggtttgtttttgtttagtgagttttaggggtttagttgatagttaggtttatgtgtttttgaaatttgttggtatttgttttgtgggttgggttgggagatgatgaggattttggtggggtttgtttgtatttggttaaagtttaggaagtttgggttttagtgaggaaaggtgttttaagtttttttgtggtttttaggtgaaagaaaatgatttttttgttttgttgtttgttgttgttttgaggttgaatttttagtttggggttggggaggggtgagatggtgagggggttggatggggtagggtggggagagttgttttgaggttttgggaaagttagtttagaaatgggtgtgattgtatgaagaagttttggtttggtttgttttttgtg

SEQ ID NO: 149 - DNA, 11667 bp, Artificial Sequence
  chemically treated genomic DNA (Homo sapiens)
tgtgagggataggttaggttgaggtttttttgtatagttatatttgtttttgggttgatttttttaaagttttagagtagttttttttattttattttgtttagtttttttgttgttttgtttttttttagttttgagttagaagtttagttttaagatggtagtaaatggtagagtaaaggagttgtttttttttatttgaaagttgtgaggaggtttggagtgtttttttttgttggggtttgagttttttgggttttggttgggtgtgggtagattttattggggtttttgttattttttagtttagtttgtagagtgagtattggtagattttaagggtgtgtgagtttggttgttggttgggtttttgaggtttgttgggtgggggtaggttggtttaggttgtgtggggtgtttataaaaagtgatttggagatgaatttgtttgtgtgtggttggttgttttgttataggggtgaaggtgtttgatgtaagtggaatttggtggagtttatatgaattagaatagagtgaggtttttggtgtattagggattttaggaggtagttttgttagagatgtgggttgtgttttgggaaattggggggtggggggaggggaagagtgtagaaaagaaaatttattaaggtggggattggtttgagtggggaggggtggtgaggttggagtttttttttgttgggtggattttttatggttagaggttgagttttatttttgttggttgttttttaggggaaggggaaggagaggggagagtagtgataggtttttagtaagtaagtgtgggtggtatttgtagtttttagaagtttgagatttggttgtaagtggatttgtgtgttttaattttttgttgtgttagtgtttggagtggagagtagaggtggtttggttgtggtgtgttggttttgttatgatggttagttattttgagtttgaggatgtggtgggggttttgttggttttagagattggttgtatagttaaggagttagaagggttgttgttgagtttaggtaagggtggtgggggtggtggtgggatagttttggagaagttggatttggtgtagaagtttttgtatttgtatgtggtgtttattgttatggtgatttgtgagagtgtggagaagaggtttatgttgtttggtatttattagtatattattgtgaagtttttgttttatgagaagaataagaagggttggtaaaatagtatttgttataattttagttttaatgagtgttttattaaggtgttgtgtgagggtggtggtgagtgtaagggtaattattggatgttggatttggtttgtgaagatatgtttgagaagggtaattattggtgttgttgttgtatgaagaggtttttttggttgttgtttgtgtatttttagtttggtaaggggttttttggggttggaggtgttgtaggtgggtgtggtgtggtgggtgttggggttgatggttatggttatttggtgttttttaagtatttgtagtttggtttttttaataatttgtggttgttattgtagttttttttatttatgttttatgttttttgttagatggtggtagttgtagtggttgtagtagttgtggttgtagttgtgggttttggtagttttggtgtggttgttgtggttaaggggttggtgggtttggttgttttgtatgggttgtatatatgtgtgtagagtatggtgttgttttttggtgtagtgaatttgtataatggtttgggaggtttgttggttgtatttttgtttttgttgtatttttatttgtatttgtatgtatattatttgtatgtggttgttgtattgttgtttgttttattgtattatggggttgttgtgttgttgttgggttagtttagttttgttagtttagttattgttgtgtttttggtgtttgtgtttattagtgtgttgggtttgtagtttgtttgtgtttggtagtttgagtttgttatgatgtattgtttttattgggattatgatagtaagattggtgtgttgtatttgtgttttgatttttgagagtttattgtatgttggtgtagatggatgtgaggatgtagggatgtgtgatgttggttttggttgtagttgatgatgttgttgttagtttgattttatattttttgggtttgtttttggagttagtgtttagggtttttttgtgtttttttgtttttttaagtttttgttgtttttttttgtttttttagtttatgtttttttgtgtttatttttttgatttttgtgattttgtatttttttggtttgaagttgtttttttgtgtgttttttattgggtttgtttttttttggagttttagtgttttttgtttaaatttattgtggaaagggtttggggtggaggtgtgattgggtgttggtagtgtagattttttggtttttttttataggttggtgtgtttgttttttgtgttttttgtttgattgttgtgtagtttatggttagatgtgttggataggattgatggtgggattgtgttgtttgagaaagggatggattaatatgtgtgtttgttttgtgaatttttttgaagttgtttagaagttgtttgttgtggggtttattaggtggggtgggggttgggatttagtgggagttggggtagtttggttttatggtttgtatttggtttatattgtgggtgggtgtggagggaggttgtgttttttttgttattagttttgttgttttgggtatttttgggttttggtggttggttaatgttttgtttgaaagattggtggaattttttaagagagtatttaaaaaaaaaaaaaggaaaaaaaatttattgggtaattggggaagtattgtggttttggagtttgttaaatttaaatatgaaaattaaaagttttagtattttttatttttttttttggaagatttgtgttagagtttttgttgggtttttaaaaagttgtgtttagagttaggagaatatatttaataaaagatggttttgtttattaattggggaagttttattttttttttatttgaagaaaaaaattaaaaataaatgtttttggattttttgatgtaagttttggaggtagggagattattgtttgtttggtttatgttgttgggatggtttgttttttttgttttttgttttttaaattttttgttttttttattttgggaaggagaaatgtgaaatttggtagtggttgatttaggtggttttgtggtttggagttggtttggtttgaaaattatagatttggttgtattgtagtttgttgtttgggggattaaattttttagagagaattagagtatttttgttgtgtttttttgttttgtttttgttttttgttttgttgatttttgaataaattttgtgtttttttttttaatatggatttttttatttttgttgttttttagtttagtagttagttaaaagaggaagatttttagtaaaattttattttttttagaatgagttaaataaagattgagagtaattggggtggtaggtgtttgtggttgttgttgttgttttgtttttttgggattgtttgttttttgtgttattattggtttgttgtggttgtttaatgttagtagaaagattttttttgttgtggtttgtttataaggtgtgattgtaggtaggatttggtttatttttgtatttatttaagtttgtattttattttatatatagttgtattaggtgtatgggttggttgtgtttttattattgtttttaaattttttgattttgagttaattataatagttaagagtttgttttaaatattaatagataaaattttggttgtggaaatgtgttgtaaattgttaatttttgtataaatgtgagaagtgattgttttattatttttaatagttagaatttatttattttgagatatgggtaggagatttggaggttttagtaaggattgaatatattttgtggttgtagaaatttagttttttttttttttttttttttttttattgagatttttaaataatgaattaagatttatgtttttgtgtaggtatataggtgtttgatttggttgtagtttggtttttttaggtggattagggggtggttggtttttatttttttgatgggatagatgatttttgatttttgataggatagatttgttggtttttgtgggttgttgtttagttgagattagattttgtatttagtttttattgttttttttttgtttattttggggtttggttagtaatgtggtggtaggtttaggttggttggtgggttaggagtggttttgtgttatgggaatgagtttgtaggttttttattttagttttttagtggttaggtggtaggaattttagggtggtattttgttatgtatagttgggtttaagtggtttttgtttagaatgttttttgttttttataggtattttgtgagaggttataaggtaggagattaagttatggggatttttagggggtattattttaagattgggattggagtttattaggaattggtaggagtaggatggagagggaggtttagttggagtaggaagttttagaggttggttaggtttggtgtttgggtgtttttggtgtttggttgttttattatttggttaaggggagttgtagaatagaaagtagtttgttgtgtgtatgtttgtttgtgttttgtttagtgtgaaaatttagtttatgggtaagtaattgtgtagtttgtatttgttgtaaatgtgtgtgtatagtgttagttgtgtattggtgatagggtgggaggtgtgtgtgtttgttatttgtttgtagagtgggtatatatttttggtattgtaataattatatggttaatatttaggaagtgtttattgggattatagtgtgtgtggtatttatattttattggtgatgtgtgtatttgtgggtgtgtatttttggtttgttgaaaaataaagtaatatggatagagtttttgttttattaggtagaggttttttgttttgaagttggttgttagtatttttttaattgttgttttaagtagagaaagtaagggagggaagtttttaggattaagttttggtgggtaggtagtagtttatttttagtgagatggagaagttggttggggttagtaatgaaggattagtttgttttttttttgagaattgaaaggtaaaaggtatttaaggttgggaagagagtagtagttttattaagtaaggaagataaaatgaagtaattagtgagggttttttgggtttatatagggattgaaggaggtgagagaagggagttaaattatattttatttttttatggatgtttataggaaaaatttgtttaattttagtttttgggatttttttaaagtttttaagtttggttattttttttagggttgaaagtttagtttaatggtaggttttttttattttttatttttttttttttttttttttttttgtatttttgagtttttattatagaagttgatttaagtaatttttgagggtaaaagtatttgagttatatagtaattatgttttagtatatatagtttggtttagatggttgggttatgtgagtgtgtgtatatatattggttagtgtgtaaatataatgtaaatagagtttaatataaatatttagttaatttttgaatgttttgggtaatgagttgtttttgtatgaagattatgtgtgtggtgggtgtaaatattttatatattgttgatagtatgagttttttttttatatttatatagaaatttttagagttatttttattttattaaaattgtttagttagagtaagtgggttggtttggagaaagtagggggaggtgttttgtttttaagagggatttggagaaatttttgttattgaagtatatgtattaagggattgtgggaaagggatttatggagttttggagatggttttgtattttattttagagggtattgatgttttgtttttagtttgtattagtaaatagtttattgttttagatttgaggtttagatgagtaagaggttttggattttttatttgaggttaggtgtatttagtttttgttagggttttttggaagttaaggttggagatggggttgtaaggagttttttggtggtgggtggaaattggggttagatttaggttttatgtagttagataagtagaatatgggttaggaatttgagtttggtttaagatagtttgtttttaattgagtttttttttttatgaaggtttgggttaggttttatggataggattattggattagatttttggtttttgggtgggggtttaaggttaggaaatattttgattaggtttagtatttttgtagtgtttttattttgtagatttaatttggtggtgattttggggttttgtttgttaggtttattattattgtgtggtagtttttattttttggagtagattgtgggatttatagaaaagatggggaaaggatgggattaagagttttatgtttttgggataattaggaattaaggatttttaaaattgagtagttttagtaattttttattttttggagagaggatttttagttgttataaaaagagtgttttgggtttaggaatttaaaattatattatatttgaggaattttaggttttaagaagagaagagattaattagaggttttttaggtatttgtgaggtaaatggtttttgaaatttttaaaggagatttgatagtagttgagtttagttgttattgatgtttaagggagttgtgtagtaagggagagttttttaggagtagtaagggagagttttttaggagaagaaggaagtatagtttgagttgtgttttttgttttttttgtttgtttttgtattatagaaattgttgttgtataggttgtttgttgtataggtttggtgttgagttgtgaaaagtatgttttgggattttgttattttgtggaggtggtttgtgtagtatgaggtaaagatttggtttgtttagttaggaagaattgggttggagtttggtgttttttttaatagttatgtaattttgggtaaaatatttatttaaattttagtgtttttttttataaaatagaaatatgtgtgtgtattagaattattaaaataattaaattttttaatttttaagtgtttagtttatagtagatgtttaataatgttttttttttttttttattaaaaaaaaaaaaggaaggaaggaagtaaaaaaggaaagaagaaaggaagggggaaaaaaaatttttagtaataattttttaggatttgattttttaatttagttggttataggtattttttgtgagtattttttggggttaggtgtatgtgattgtatttattttgttttagttttttggttgtgggagtgaggtttatgtggttgttgttgtagtgaatatttaagttttgaaggtatagttggtgggtgttgagattttgtttggggtttttttaattttttttttgttttttttaaagtggtttttatatgtttaggaggttttttttgagaaaggttgtgttgatttgtgaagtggtattgatttagggatttatttataggttgtttggttggtgtttttagtttttatgtgttttttttgattggttgatttttttttttttttttttttttttttttttttttttagaaaagtagaaggtagttattgggttagaggttgtagggttagtttgtgggtgaggtttttttaggtttttgtggagaaatgggaaatttgaggggtaaatgtaggaagtgggttgggttaattgtgggtgattgaggtgttgttagtgggtggggagtgagaggggttagtagttgggaagattttggtttggagtgttttgtgtttttgggtttgttggtggtgttgtaagtttaggttttggggtgtgagttaagttttttttgttagttttaaataaaatttgggggagaatgagttggttagtttgggtatagggtgtttttgattgttgggtggtgggtggaagtgtaggggttttgattgtttttagaggtgttgagtgtatagggtagtggttgtagagttttggtgtgaggttaatttggattatttatgttgggattttagtttgtttggttgtttttagtaataataatagtatgaaattgagttttaaaaaatttttttttgtatttttttttatgtataagggagaataagtatttttaggtagttaaagaaaaaaaaagggtaggattttaggaaattttaatttttatggatgaggagtgaaggggaatttgttttttgttttttttgtttgtttgtttttagaagagaaaaaaaggaaatttgatatatatttttaaaaatttttttttaataattgttaaaggttgtgagtgtgagtagagagttaggaaattgagtttttgtttgtggtgatattgggtttttgtttttttttttgaagtttttgtgattgttgattgtgtagagataaaggttgggttagggttttgtggaattttgagggaggggtggtggggttgttttattggttttttttaattttatgtaggggggttaggtgggtttagttgatttttggaataggggttataaggttaggggttgtttttatttttaggtttagatgaggtatggatttgtttttttttatttttttgaaaggtttttgttgttaaattttttgtattttgtttttattagtattatattgttttatttaaagtttttggaggtgttagggatagtggttttttattggatttgatttttagaaatggaattgtgtttaatttttgtggtgattttggtttttgtgattgttgggtttggttggttggttagatttgaatttgtgtattgtttgttttagttgtgttttttaggggtgtttttgtgttttttttgggttgtggagatttttttagtgtttggttttgaattttttgtgtaatgtttttttgttagttgtatggttttgtagagaaggtgggagagtgtttgtgattttgttttgtagtttttggtgatttaaaaatttaggttgttgtggaatttagtttttatggtattgtttttgtaggtagtagttttgggtttatatttgaggttgttttttttatagatatttttgggtgatgtgagtgttgtgtagtttagaatttttggaagtatgagaggaggatgagtttggtggtttgttggtgtggtgatggagggttttttggtagttatattgtgtgttttttatatatattttaatagttttggggttttgggttagtgttgtagtttaaagagattttgtagttgtatttttttttaggttgtggtaaattttggttttgtttttttttattatggtttgtgagggtaggaggtttttgggggttgatttttttgatttgaatgagttaggtatttttttttattttaagtgggggtgtgatttgaggagataaaggaaggatgatagatttggggagtggggttttgtagttttttgggtttggagtgtatttttttttgttttttttttttattggtaggattgggggttttgaaattggagttgtttattggttggtggatgagagataaaggagtttggtggtgttgaagtgttgattagtagatttggatttggatttttttgtgttttagagtagtatttgaaattttattttttaggtggtattgatggttgagtagtttttttggtgttatatggtgtttttaggtatagatagttgtgtttgtgtgtgtattgtgtatgtataagattgtaggatgatgttttgtatgagttttgtattagtttttttgtttttagttagaggtatatgtatatgtgtgtgtatttgttaagtgtttagggataggtgtgtatttttatatatatgtgatgtgtatgtgtatatatttgtagaatgttttagtatttattttataggtatgtatagggttggttgtttttaataagttattattatattttgtatttatataggtttttttagttttggtatgatttttagaattattttgggaaatattttttttttaaagtttatagatgaggaaataagtaaaaagaatttaatgggtatttgtttgtatatattgtgagagagattgaggttagttaaagattttgtttattgttgaatttgggtgtgttggttgaatgtgtttatagatgggtttgtttagtgttttaggtgattttaggtttggtgggttttggttttttgttaggttttttgggagatttattgtgttgggtgtggggttttaatttttgtgttgataagtattattttttggagttgggtgattttagtgtttagggtgggaagttgggagttggttggagtgttgttgaggtgattttggtggttttaaggttatggttgattatgtgtaattgggttgtaaagtttggtgggttttggtttttaaagtagttatgttaggtaaatgtgtgatgaaaggatttttttagtttatttataaatttaggaatttagggttgttggagtagtgaggaaatttttgttgttttgaatttttagtgtttttatgagatttggagtttataatgtttattttatagaagtgattagttggaggttagagtggtatagtgagttgtttaagtttaatgttagttgagtggttatagttgggattggaatttttaattaagtgtgtttggatttttggtttatagtttttttgtttttagtaaggattgttggtttttttgttttttgtgtgtttaggagttattttgttattagtttttgattttttttgttaagaatgtgaaaattattatagtttttattagtattatttaaaaggtttttatatgtttggaatttgttgtttgaaaataaattttttgtgtgtgttggttttttaattttttttaaggtatttggtttttttttattttttaagtttttgttgttgtagagtgaggttgtttaagggttgtagtttgattatattttgggggtgtttttgggtttttgtgttgggtttttgtagattgaggttgttggtttttgggttttaaggttgtttttattttgtagaatttgggagttggaagggagtttgtggtttggtgaggttgttgtttgggtttatggttttgaggttgttttttgttggtattgggtgatattattattgttttttttggtggtttaggagttgtatttatgtgaggggtttgtgtagagttaggtgattttatttttattgggtttttagagtggttgttgtatttgtagttattgatgagatttttttgtattttttaatttgagatttttttttgtagatattagaggttttggtgtttggatttagggataaggtagagagttggagttttgtgttggtaattttgttgttttgtggtgtttgttgggatttgtggttaattaggtatggttataggtggatgttgggggattttggggatggttttaggttgtgtttgttttttttattttttgttattatagtattgattggtgtttatgggttttg

SEQ ID NO: 150 - DNA, 1394 bp, Artificial Sequence
  chemically treated genomic DNA (Homo sapiens)
tggaattttggtttgaagttgagataggagattggatgtgaggtttttttagagttggttttttttaaataatttttaaaatttttagattttaggggtatgttgaaattttttaaagtagtttaaagaatataatgagagttttaatattttaggtggtggtgtgttggttttttggagtggggtgggatgtggttgtgtggatttatgtgtataattgtgtgggatggggttatgtggatttatgtgtataattgtgggattttagtgttagtgggattttagtgttagtgggattttagtgttagtgggattttagtgttagtgggattttagtgttagtgggattttagtgttagtgggattttagtgttagtgggtttgtggtttagtggagtgagtggagtgttggtgatttgagtggagattgtgttttggatgttttagtttagatgttaagttatagtttgtgtagtagtagtaaaggggaaggggtaggagttgggtatagttggatttggaggttgtgatttaggggaaagtgtgggtggttgatttagggtagttgtggtggtgaggtaggtgggttttttgttttttggagttgtttttttttatatttgtttttggtgtttttagtagtttttattttggttttttgtggttattgtgggatttggtgttgttgttagtttagtggggagtgaattagtgtttttttttgtttttggtttttttgatggtatgaggaatttttgttttgttttatagatttttggtttttgttgagtgtggtattggagtttgttttgttagggttttggaattagagaaagttgttttttggttatttgaagtgttggatttttatagtgttttttagtttgggtgggagtggtggttgtgttgttgaaggttggggtttttggtgtgaaagggaggtagttgtagttttagttttattttagaagtggtttttgtattgttgtggtgggtgtttttgggttttgattttgttagtgttgtggggtagaggtatttggagtttgtagggtttagatttgggttggaaaagttttgttgattgtaggtaagtgtttgggaggggtggttaggtgaagttttggtgttttattatatatttttgggttttatgttagttgtatttgtggtattgggtaggaaatggtagggttgaggttgattttaggagtataagggagttttttattttttgtttatatttgttatttttagttttgtaatttattttagatatatagaaagtaagtaggattggtggggagatggagtttaataggaatattttttagtagtgagtaggggttgtatgggatgtgggaggagtttagaggaggtgtggagagtgtttg

SEQ ID NO: 151 - DNA, 1394 bp, Artificial Sequence
  chemically treated genomic DNA (Homo sapiens)
tgggtattttttgtgttttttttgagttttttttgtgttttatatagtttttgtttattgttggaaaatatttttgttaagttttgtttttttattagttttgtttgttttttgtgtgtttgggataggttgtaaaattggaggtgataaatgtgggtaggaaatggagggtttttttatatttttagggttggttttagttttgttattttttgtttaatattgtggatgtaattggtatgggatttggaagtgtgtggtaaagtgttggggttttgtttggttgttttttttggatgtttgtttgtagttagtgaagtttttttaatttaggtttgggttttgtgagttttaggtgtttttgttttgtggtgttggtgaagttgaagtttgagaatgtttattgtagtgatgtgaaggttgtttttggggtggggttgaggttgtagttgttttttttttgtattaaggattttaatttttagtgatgtagttgttgtttttgtttaggttgggaggtattgtagggatttgatgttttaggtggttaaagagtgattttttttgattttagggttttggtggggtaggttttagtattgtatttggtggaggttgaaggtttgtggggtaggataggagttttttgtgttgttggaagggttgaggatgaaggagggtgttaatttattttttattgggttggtggtaatgttgaattttgtagtgattgtggagggttaaggtgaaaattgttgggggtgttgagggtaggtgtggggaggggtggttttagggagtaaggagtttatttgttttgttgttgtagttgttttgggttgattgtttatgtttttttttgggttatgatttttggatttaattgtgtttggtttttgtttttttttttttgttgttgttgtgtgggttgtaatttgatgtttaggttggggtgtttagggtgtagtttttgtttaggttgttagtgttttatttgttttattgggttatagatttgttggtgttggggttttgttggtgttggggttttgttggtgttggggttttgttggtgttggggttttgttggtgttggggttttgttggtgttggggttttgttggtgttggggttttgtggttgtgtatgtgagtttgtgtggttttgttttgtgtggttgtgtatgtgagtttgtgtggttgtgttttgttttgttttagggagttagtgtgttgttatttgggatgttaggatttttgttgtgttttttggattgttttgggggattttggtgtatttttaggatttaggagttttggaagttgtttgagagaaattagttttgggagggttttgtatttagttttttgttttggttttggattggggttttg

SEQ ID NO: 152 - DNA, 6357 bp, Artificial Sequence
  chemically treated genomic DNA (Homo sapiens)
gtgtggagattgggaaggtgataaggtgaaggtaattgaaggaagagttgagggggatatggggaaggattttgttttattttttttaagttgaattattgttttttgaaggttggtttttggagaaattaaagggtttttgtgtgatatagttatgttatatataaatagaattttgaagtttattaatttttgaggttaagtaagagggaatgtaggggttaaggtagaagagaaattaaaattttagagtgttgagtaaagatgttaattagagaaagagaaatttatttgtgatgttaattaataagtggttaattaaaatggtattttgagtgttaattaattgttttattaagttatagttattattggaataaattgaaatttttttgttttgttttttgtttttggtgtaggtggggttgtgtttttagatattgtgagaggttttggggtgtggaggttgggggtagttttggttagtttttttagttttttttaggtttatagaatatgttattggataagtgtttaagtagtgatttttggtttagatatattgtttggggagtaagtagttgtgttgaagaataatttatttagtagtagttaatattgatgtttttttttagaaagagtttttgtaaagtggggggatgtgatttgtgggtttttagtaggggtaggaggtagtttagtttgagagggggtgttttagggtttggattttgtatttttattttttggaatatatttaatgttttattttgaaaattttgtttaggttttggttttggtgttgtttagtaattaggaaagagttggatttgtttttaggtagtaagaataggattgttagttttttgtggttttgttttttgaggttttatgagaaggggatgggggtgtaagaagggaagagtgaggtggtgtgttgggtgttggggatgaggatgtatgttagttaagatgtgttttttatttagtttatgtgtgtttttttatttttttggttttttaaaattggtaagagaattaagattttgaatttttattttgaggagttttttgtattttttaattgttaaatttttgttttttattaaatttttgggggagaaatatttggtaataagaagggattgtgaatttaaatgttaattgagtgggttttttttttgtagttttatttgtttggtagtttttgttgaaattaaatatatttggagtgtttagtgtaatatttttggggtgttgagtagaagtgtagtaaagagagattttagtggatttttgtttggtttgttttttattgatttttatagaaaaaaagagaatgttattggaagaagtttttttgtgtggtgggtgatgtgtgggtgggggatttgtggtatggtttatggtgttgtttttgtgtttgtgatgatatatgtatgttttgagttgtgggtttgtttttttggaggtgtgtttgattgtatttgttggtgggtttgagtgtgtttggggtgttttaggagaattgagagaatggtttttatgtgtaaagttttaaagtattaatatttttattatattattattatttaatataataatatttgtttggttagtggtattaattaggttatattaaaattgtagtgtgtttttaatggtgtgtaatgtgtttatatttatatttttttttttgaggatgggtggttgtaggttggtaggggaggagagataggtaagtggtgggttggattagggtgtgatgttttttattatgtatataaatatatatagtttattggatgtttgttgggtgggagttgtaatttttgtgtggttgatggggttttttgttgtgtatttggttttgtgttgagtattttgtagtttttttttgtgatatggtgttttgaatttggtggattgattttgtttttttttttttttttgtgtgtgtttgtgtttaattggttaggtttttaagatttgggagggttggtgtgaaagaattaaaatatttttaattggagtttttttgttgagaattggaggttttgttttttagtttggtgtttttaggattttttttttagagggaattttttttagaaattttagggtgggtttgtaaaagatgtttttgtagagtaggttttgttagggttttttttttgtttttggtgttagtggttggtttgggtgttttgtagattttggtgaggtagatgttaagtttggagagtgttttttttgtaggtgttgtggtgagattattttgaatatgtaatatatttgtaatgtgtgttgaggtgtgatgtgtgtgttgaaatagggggatgggggaatttgaagttggattgggaaggtgggggggaggtgtatagaatttataatgtattttgtaatttaataatttgaatatttatttattaaaagttgttgtgtgatatttatattgagttattagtttttgtttttaatttgggtgaaaatgattgtattgttgagttatggttgtagtgtatggggatgttgttgtttgtggttggatagagtttattagttataatgtggaaggtttttgtatttttttgggggtgggaggaaagtattgttagttttgtttgggggttgagggtaataagtattgagttttttgttttatgtagggttagttgtttagtttagtgaagtttttgtgatttggtgtgtgttttttgtttttttttttttattaaagaagtaaattttttatttattttttttaatttgattgtttagagttgttgttttttttttgttagattttttttttttgattagtttgagtatatgattagaattgtttagagagtaggaagtatattgattttagtttgttttgtttatagataggttttgataaggttgttagaatagttggagaggtttatataattatttaattattaaaattgttagttaggtgggatgtggatttgtgttttgggttgtgttaggtattttagtattgggttgtgtgtgtgattgattggtgttgatagtattgtaaaataattatggtgaattttttgatgtgtgattttattttaagtttatgttttagagaggtaattggagaatgagaagggttagtgttattttggattatttggaatttgtgagaaagggtaaaatgggggaaggagttttgaggaaaatgggagagatgggggtgtagagagagagggaagaagaaagtgagttatggattgttggagggattgtaagtaatttgttaaattgtgtaagtgattttttttagagttagtatatggtagattgattttgtttaatgttggttttagttatatttaaaatgatttagtggttattattgtgattggtttaggaattgataggtagttttaggtgtaaggagtatagattttgtttattggagatgtgtttgtaattgttgttaaatatagttaagtaaatattattagtgaagagttttgttaagagaaatgttaatttaataaatatgttttttttttttgttttttgtatggttgtttgtgttttttttagaggtttttttttttgtttttttgttgtttgggttagatgttttaggtatggtgttgatttttgttattttggagttttgagttgagttttgggtagaagatgataggttagttgtggggtaaggaggttgtggaaatgtggaatggttttggggagatggaagtgtttaatgagatttattttgtagtttgggtttagtttattttttttggagattgttgtggtttttgaatttgggtttaggtttttatgttttggtggttagaggatgttgtggggattattggggagttgtttttagttagttttttgttttatgttggaggttttggtgtggttttttttttgaattagattggtgattttgggttaggttttaaggattgttttggtttttttggttttgtggggagaatttgaggaattgagtttaagatagttgatttaggttgtttttatttagattttgtgtttttgatttgttggagtgaatttgatattgttaggtttttttttatggtatggagtgaatgaagagggttatagatttttttatttagtatagttttttggtaggttttggaaatttatagggagtagaagtatagtattttttgaattgttttttttttttgggtttgtggttatttgaaggtagagttttgtgtttttaagatagtaggtttttggttaagtttggagtttggggttttaatatatttatatagggttggtattattgtttttttggattaaaggtaggtttttatattttttttaaaggaatagaaggaaggaaaaggaaattaatatgggttatgtttagatagtaggtttatggtaattttttatagttatagagttttaatttgagtatttttttagagaggaaaaatttaaaaaatttttaaaagggggaaagttgggtagattatagtatttattttttatgtttaggtagaaaaattaatttagagggagtaaaggggtaagaaatatgaagagattttttttgggagttgaggagtattttagtttataatttggttaaaggagaaagttattggtttttttttttgatagaggtgtgttatttatttttttagggaatatgatggtttataaatgaagaggttagtttttttgtagtttttttttatagagtgtaaaatatatattgtttttattagtgtttgggatgtaaagaattttgtttatttaaaagagatattgtatttttaaagttaaatagtattaatgtatgtggtgaattaagtaggtaaataatttatatatggttgttgtatttgaaggaattatttatttttatgtatagtaaattgaagaaataatggtattaatgagttttgtaaaatgtaattgtgaataatgaaagataatattgtattttgtaatagaaagaataaaggtgaaataattagttagtaaagaggaaaagaaagtgagtaatgattaaatgattaaaagttggtagagtgaatttaatgttattgttagatgtagttatttatttataagtgaaagttaggttttaagtatagtgtaattatagttggggttgttagtttgatattaatgtagttagtagaaattttttaattggttttagaggagaaagtgaattagaaaatatattaatattttaaaaaagtatattttgtttaatttttttatttttgaataatatttgaagattaaaatgttttaggtataagaatttaaatgagtaattttgtttttgaaggaaatggttaatgagatagaaaatagattaaagggaaattattagtggatgagagatattgataggtttgttttgttgattggttggtttgttatttgtagtttgtgttttttagttttatgttatgagttaagttgataatatgaaaagatttataaatgtgtagttagaagttatagtttattatttggaaatttaaatgtaaggggagggggtggtagagaaggtattggtgaggttgggagggagaggtgtgtattgagggaggaggaggaggaggaaggggaggagggaaaggaggaggaggaggagaaaagaagtttttattttttggtataaaattggttatattagagaataataataagttattatttgttataaatgtgttatggattgttaaaaaatgtagttttgaattgataatattgtttgaattgaagatagtaataaaatgtttaaagttgtggatgtaattttatatgtgtttgggttgatgtgatatgattgtattagggaaataaagttaagtgtagttaggatttgttagtatagtggtttttgatggaatagttgaggtatatattgtttgtggtatggattttggggttgaatgtttatgattaagatttttgtttttttgaaatgaaatagaaataggggagttgtaggaaaattgaattgtgtttagggttaggagtaagataggagtttttagtgaagatttgaatatttagaattggaatgggtaattagtagatagttaggaaaaaataaataaataaataaaaaagtttggatggatttttgtaaataattattaagaaaaataaaaatgaatttttttattagtttgttttggaggtagttagaaataaataattaaagtaagagaggatgaagatttaaataaaataattatgtgtattattaaaataattatatatgtttgtatagatatgtatatattaaggaatgtaatgggggttttttgtatagttttaggagatgtagga

SEQ ID NO: 153 - DNA, 6357 bp, Artificial Sequence
  chemically treated genomic DNA (Homo sapiens)
ttttgtattttttgggattgtgtgaggagtttttattatgttttttggtgtatatgtgtttgtataaatatatatgattattttaatgatgtatataattattttatttaaatttttatttttttttgttttggttgtttgtttttgattatttttaaggtaggttaataagaaggtttatttttattttttttaatgattgtttatagaggtttatttaggtttttttatttatttatttatttttttttggttatttgttaattatttgttttagttttgaatgtttagatttttgttgaaagtttttgttttgtttttgattttaagtgtgatttggtttttttgtagtttttttatttttattttattttaaaagggtaaaagttttggttgtgagtgtttggttttggagtttatgttatgggtgatgtgtgttttagttgttttattaaaagttattgtattaatagattttgattgtatttagttttgtttttttgatatggttatattatattaatttggatgtatgtgaaattatatttgtaattttaagtattttgttgttatttttagtttgaataatgttgttgatttgggattatattttttggtagtttatagtatatttatgatagataatagtttattattgttttttgatatggttgattttatgttaaagaatgagggttttttttttttttttttttttttttttttttttttttttttttttttttttttttttttgatgtatattttttttttttaattttgttgatgttttttttgttattttttttttttgtatttgaatttttagataataggttgtgatttttggttgtatgtttatgggtttttttatgttattaatttagtttatagtgtggaattaaagaatatagattgtaagtgataggttagttagttagtaaggtaagtttgttagtattttttatttattaatgatttttttttagtttattttttgttttattggttgttttttttaaaaataaaattgtttatttaaatttttatgtttggggtattttggtttttaaatattgtttgaaagtgaaaggattaggtaaaatatgtttttttaaaatgttaatatattttttggtttatttttttttttgaggttaattaggaaatttttgttggttgtattaatgttaaattgataattttagttataattatattgtgtttgaaatttaatttttatttgtgggtagatggttgtgtttggtagtgatattgaatttattttgttagtttttgattatttaattattgtttgttttttttttttttttgttagttgattattttatttttattttttttgttgtaaaatgtagtgttgttttttattatttatagttgtattttgtaaggtttattagtgttattgtttttttaatttgttgtgtatgagaatggatggtttttttaagtgtagtaattatatgtaagttgtttatttatttgatttgttatatatattggtattgtttgattttaaaaatgtagtattttttttaaatagatagggttttttatattttaaatattgatgaaggtggtgtgtgttttatattttgtagaaaaaagttgtaggagggttagtttttttatttgtgaattattatgttttttgggaagatagatgatatgtttttattaaaggaggaggttagtgatttttttttttgattaaattataaattagggtgttttttagtttttagaggggatttttttatattttttatttttttgttttttttgggttagtttttttgtttaggtatgaagaatgggtgttatgatttatttagtttttttttttttaaaagttttttgggttttttttttttgggaagatatttggattaggattttatggttgtgaagaattgttataggtttattatttgaatataatttgtgttggtttttttttttttttttttgtttttttaaaaaggatataggagtttgtttttagtttaaggaaatggtgatgttaattttgtgtaaatgtgttggggttttaggttttaaatttgattgaaaatttattgttttggaggtatagagttttgtttttaaatggttataggtttagggagagggagtggtttagaaaatattgtgtttttgttttttgtggatttttagggtttgttgagggattgtgttgggtaaggggatttatggttttttttatttattttatgttatgagagagaatttggtagtgttagatttattttagtgggttggggatgtagggtttgggtgaaaatagtttaggttggttattttggatttggttttttagattttttttgtaaagttggagaggttggggtggtttttggggtttggtttagagttgttagtttagtttgggaaagaagttgtgttaggatttttggtgtggggtagagagttgattgagggtagttttttagtggtttttgtaatgttttttggttgttgggatatgaagatttaggtttgggtttgagggttgtggtaatttttgaggaaggtgggttggatttgggttgtagggtgaattttattgggtgtttttgtttttttgaagttgttttgtgtttttgtggtttttttgttttatggttggtttgttattttttgtttgaggtttagtttggggttttaaggtggtgggagttagtattatgtttgggatgtttgatttaagtagtaaaggagtaggaaggagaatttttggaggaagtgtaggtagttatgtggagggtggggaggaaaagtatatttattggattggtattttttttaatagagttttttgttaatgatatttatttaattgtatttgatagtagttatgaatatatttttggtaaataggatttatattttttgtgtttaaaattgtttgttagtttttaagttaattgtagtaataattgttggattattttaaatgtggttaaaattgatgttggataaaattaatttgttatatgttggttttgaaggaaattatttgtatagtttgatgaattgtttgtagtttttttagtaatttataatttgttttttttttttttttttttttgtatttttattttttttgttttttttggagtttttttttttattttatttttttttgtagattttaggtaatttgaaatggtattgattttttttattttttgattatttttttgaagtatgaatttgggataaaattatatattagaaaatttgttgtaattattttgtggtgttattagtattgattaattatgtgtgtggtttagtgttggaatgtttagtgtagtttgggatgtggatttgtgttttgtttgattgatagttttggtaattaagtgattgtatagatttttttggttgttttaataattttgttagggtttgtttgtggatagaataagttgaaattaatgtgttttttgttttttgagtagttttgattgtgtatttagattgattggggaggaggaatttgataaaaggaaaatagtagttttaaatgattggattagggggagtaggtagaaagtttatttttttgatggggagggaagagtgagagatatgtattagattataagagttttgttgagttgggtagttggttttgtgtggagtgagaggtttggtgtttgttatttttggtttttaggtaggattggtagtattttttttttgtttttaagggggtgtagaggttttttgtgttgtagttgatgggttttgtttggttgtggatagtagtgtttttatatgttgtagttataatttggtagtataattgtttttgtttggattagaggtagagattggtggtttagtgtaaatgttatgtagtagtttttaataaatgaatgtttagattgttagattgtgaagtatattgtgagttttgtgtgttttttttttgtttttttaatttggttttgaatttttttatttttttattttagtatatatattatattttggtgtatgttataaatatgttatatatttagagtgattttgttatggtgtttgtgggaggggtattttttgagtttaatatttattttgttgaggtttgtggggtgtttgggttgattgttggtattaggaataggaaaaagattttgatgggatttgttttgtggaagtgttttttataagtttattttggaatttttgaaagaaattttttttgggaagagggttttgaaagtgttgaattaggaggtgggatttttagtttttggtggaggggttttagttaagagtattttaatttttttatattagtttttttaaattttaaaaatttaattaattgaatgtaaatatatataaaagggggaagggaagtaaaattaatttgttgagtttaaagtgttgtgttgtgggaggaggttgtagggtgtttggtgtagggttgagtgtgtagtggagggttttattgattgtgtggagattgtggtttttatttggtagatatttagtgggttgtgtatgtttgtgtgtgtggtggggggtgttatgttttaatttagtttgttgtttgtttgtttttttttttttattagtttgtagttgtttatttttagagagaaaaatgtgagtgtgagtatattatgtattattagggatatattatggttttaatgtggtttaattagtgttgttaattgaataaatattattatattgaataatgataatatgatgaaaatattaatgttttggaattttgtatgtgggagttgtttttttagtttttttgggatattttaagtatgtttagatttattagtagatgtggttgggtgtatttttaggaaggtgagtttatagtttaagatatatgtgtgttattgtaggtatagaaataatattgtgggttatgttataagttttttatttatatattgtttattatgtaaaagagttttttttaatggtattttttttttttttgtaagagttggtaaaaagtaaattagataggagtttgttagggtttttttttattgtgtttttatttggtattttaagaatgttgtattgggtgttttgagtgtgtttggttttaatagaggttgttaggtaggtggagttgtggaaaaaggatttatttaattagtatttaaatttatagtttttttttattgttaaatgttttttttttgggaatttggtgaaaagtaggaatttaataattaggaaatgtggaaggttttttaaaatagggatttgaaattttaatttttttattgattttggagggttaggggggtggggaagtgtgtgtgggttgggtgggaggtatgttttggttggtgtgtgtttttgtttttgatgtttagtatattattttatttttttttttttgtatttttattttttttttatggagttttgggagatagagttataggaggttggtagttttgtttttgttgtttgaaggtaggtttagtttttttttggttgttgagtggtattagggttagggtttaagtagggtttttagaatgaggtgttgggtgtgttttaggaaatagggatgtaggatttaggttttagagtgtttttttttgggttgaattgttttttatttttgttgggggtttataggttatatttttttgttttgtgggagttttttttaggaggaaatgttggtgttaattgttgttgaatgagttgttttttgatgtaattatttattttttgggtggtgtgtttggattagaagttgttgtttaggtatttgtttagtggtgtattttgtagatttgggagagattgagaaagttgattgaggttgtttttaatttttgtgttttaaggttttttatggtatttgggaatgtggttttgtttgtattaaaggtagaaaatggggtggggaggttttaatttgttttagtgatggttgtaatttaataaggtgattgattagtatttaaagtgttgttttaattagttgtttgttaattaatattgtaaatgaatttttttttttttgattggtatttttgtttagtgttttgaggttttggttttttttttgttttggtttttatatttttttttatttagttttaggagttgataggttttagagttttgtttatgtatgatatggttgtgttatataggggttttttaatttttttaggagttggtttttaaaggataatggtttaatttaggaggggtgaaataaaatttttttttatgttttttttggttttttttttaattgtttttattttgttatttttttaatttttatat

SEQ ID NO: 154 - DNA, 167 bp, Artificial Sequence
  ONECUT 1 MSP-Amplicon
gttttgaaatttattagaataacgacgttttaaaaataaaggcgtagtaagtattttttttttcgttgtcgcgggttgaattacggacgttcgcgggtcgtttagtttcgacggttcgtagggggcgcgcgtcgtagtcgtagtatagttcggttatttttagaaag

SEQ ID NO: 155 - DNA, 139 bp, Artificial Sequence
  TFAP2E (76256) MSP-Amplicon (on Bis-1)
tttagaagcggttttcgtatcgttgcggtgggcgttttcgggtttcgatttcgttagcgtcgcggggtagaggtatttggagttcgtagggtttagatttgggttggaaaagtttcgttgattgtaggtaagcgttcgg

SEQ ID NO: 156 - DNA, 97 bp, Artificial Sequence
  BARHL2 TSP PCR Amplicon
attgtttgttagtttttaagttaatcgtagtaataatcgttggattattttaaatgtggttaaaatcgacgttggataaaattaatttgttatatgt

SEQ ID NO: 157 - DNA, 163 bp, Artificial Sequence
  FOXL2 HM-Amplicon
ccaagacctgggcttgcagcgccgccaacaggcccggggacacgaggcgctccaggccggggtcttcccggctgctggcccctctcgctccccacccgctggcggcgcctcggtcgcccgcaattgacccaacccgcttcctgcgtttgcccctcaggtttcc

SEQ ID NO: 158 - DNA, 95 bp, Artificial Sequence
  TFAP2E HM-Amplicon
aaacccaaacctaaattaaaaaaacttcgctaactacaaacaaacgtccgaaaaaaacgaccaaacgaaaccccgacgctttaccacacacttcc

SEQ ID NO: 159 - DNA, 29 bp, Artificial Sequence
  ONECUT 1 3658891.1Forward
gttttgaaatttattagaataacgacgtt

SEQ ID NO: 160 - DNA, 31 bp, Artificial Sequence; identical to SEQ ID NO: 111
  ONECUT 13658891.1Reverse

SEQ ID NO: 161 - DNA, 21 bp, Artificial Sequence
  ONECUT 13658891.1Probe
tacggacgttcgcgggtcgtt

SEQ ID NO: 162 - DNA, 20 bp, Artificial Sequence
  FOXL2 17389-Forward
ccaaaacctaaacttacaac

SEQ ID NO: 163 - DNA, 16 bp, Artificial Sequence
  FOXL217389-Reverse
gagaggggttagtagt

SEQ ID NO: 164 - DNA, 31 bp, Artificial Sequence
  FOXL2 17389-Forward Blocker
tacaacaccaccaacaaacccaaaaacacaa

SEQ ID NO: 165 - DNA, 23 bp, Artificial Sequence
  FOXL2 17389-Reverse Blocker
ttgggaagattttggtttggagt

SEQ ID NO: 166 - DNA, 39 bp, Artificial Sequence
  FOXL2 17389-SC-CH3 (methylation specific Scorpion probe
ccgccgaaaacacgaaacggcgggagaggggttagtagt

SEQ ID NO: 167 - DNA, 49 bp, Artificial Sequence
  FOXL2 17389-SC-total (Scorpion probe specific for total DNA)
cccgggaagattttggtttggagcccgggccaaaacctaaacttacaac

SEQ ID NO: 168 - DNA, 20 bp, Artificial Sequence
  FOXL2 17389-Taqman probe specific for total DNA
ctccaaaccaaaatcttccc

SEQ ID NO: 169 - DNA, 19 bp, Artificial Sequence
  FOXL2 17389-Taqman probe specific for methylated DNA
ccgaaaacacgaaacgctc

SEQ ID NO: 170 - DNA, 21 bp, Artificial Sequence
  TFAP2E MSPepsilon-G2 (forward Primer) MSP-Amplicon (on Bis-1)
tttagaagcggttttcgtatc

SEQ ID NO: 171 - DNA, 20 bp, Artificial Sequence
  TFAP2E MSPepsilon-C1 (reverse Primer) MSP-Amplicon (on Bis-1)
ccgaacgcttacctacaatc

SEQ ID NO: 172 - DNA, 22 bp, Artificial Sequence
  TFAP2E MSPepsilon-P1 (Probe) MSP-Amplicon (on Bis-1)
ttgcggtgggcgttttcgggtt

SEQ ID NO: 173 - DNA, 20 bp, Artificial Sequence
  TFAP2E HM 76256-21 (forward Primer) (on Bis-2)
aaacccaaacctaaattaaa

SEQ ID NO: 174 - DNA, 17 bp, Artificial Sequence
  TFAP2E 76256-22 (reverse Primer) (on Bis-2)
ggaagtgtgtggtaaag

SEQ ID NO: 175 - DNA, 30 bp, Artificial Sequence
  TFAP2E 76256.2B5 (Blocker) (on Bis-2)
gtaaagtgttggggttttgtttggttgttt

SEQ ID NO: 176 - DNA, 26 bp, Artificial Sequence
  TFAP2E 76256-28dS (Probe) (on Bis-2)
aaaaacttcgctaactacaaacaaac

SEQ ID NO: 177 - DNA, 25 bp, Artificial Sequence
  BARHL2 Primer
attgtttgttagtttttaagttaat

SEQ ID NO: 178 - DNA, 27 bp, Artificial Sequence
  BARHL2 Primer
acatataacaaatatattttatccaac

SEQ ID NO: 179 - DNA, 26 bp, Artificial Sequence
  BARHL2 TAQMAN probe
ttggattattttaaatgtggttaaaa

SEQ ID NO: 180 - DNA, 19 bp, Artificial Sequence
  Primer
cggttagttcgtatcggcg

SEQ ID NO: 181 - DNA, 22 bp, Artificial Sequence
  Primer
cgaatcaaatacgacgctaccg

SEQ ID NO: 182 - DNA, 28 bp, Artificial Sequence
  Synthetic construct
tcgcgcgcctaaaaaaaaaattctaccg

SEQ ID NO: 183 - DNA, 19 bp, Artificial Sequence
  Primer
caaataatctccgtcccgc

SEQ ID NO: 184 - DNA, 19 bp, Artificial Sequence
  Primer
gttaatatggcgtgggcgt

SEQ ID NO: 185 - DNA, 24 bp, Artificial Sequence
  Synthetic construct
tacccgaccgaaatcgcacgaaca

SEQ ID NO: 186 - DNA, 26 bp, Artificial Sequence
  Primer
cgaaccataaataaacgactctacga

SEQ ID NO: 187 - DNA, 17 bp, Artificial Sequence
  Primer
gggattcggcgtcggta

SEQ ID NO: 188 - DNA, 25 bp, Artificial Sequence
  Synthetic construct
cgacccgaacaaaaactcgacgacc

SEQ ID NO: 189 - DNA, 19 bp, Artificial Sequence
  Primer
aaaaacgacgaaaacgcga

SEQ ID NO: 190 - DNA, 18 bp, Artificial Sequence
  Primer
tgcgcgtcgttgataacg

SEQ ID NO: 191 - DNA, 22 bp, Artificial Sequence
  Synthetic construct
tctaatacgcaacgcgccgcaa

SEQ ID NO: 192 - DNA, 21 bp, Artificial Sequence
  Primer
aacgattaacgaacctcacgc

SEQ ID NO: 193 - DNA, 25 bp, Artificial Sequence
  Primer
gtattgtagtcgcgagttatcgaga

SEQ ID NO: 194 - DNA, 33 bp, Artificial Sequence
  Synthetic construct
ctatacgtccaacgtactcttttacgcgctacc

SEQ ID NO: 195 - DNA, 19 bp, Artificial Sequence
  Primer
gtggtatcgggttgagcgt

SEQ ID NO: 196 - DNA, 18 bp, Artificial Sequence
  Primer
ccaaaacctcgccgctac

SEQ ID NO: 197 - DNA, 20 bp, Artificial Sequence
  Synthetic construct
tttcgcggcggcgtcggggg

SEQ ID NO: 198 - DNA, 21 bp, Artificial Sequence
  Primer
ccccacaaactcgaaaacgaa

SEQ ID NO: 199 - DNA, 23 bp, Artificial Sequence
  Primer
ggaagttcggttttttttttcgg

SEQ ID NO: 200 - DNA, 32 bp, Artificial Sequence
  Synthetic construct
tcgaatcacgaaaaccccaaaaaacataacga

1-20. (canceled)

21. A method for detecting CpG methylation of PTGER4 in genomic tumor DNA from a biological sample isolated from a subject, the method comprising:
(a) contacting genomic tumor DNA isolated from a biological sample obtained from a subject with at least one reagent or series of reagents that distinguishes between methylated and non-methylated CpG dinucleotides within at least one target region of the genomic DNA, wherein the target region comprises, or hybridizes under stringent conditions to a sequence of at least 16 contiguous nucleotides of SEQ ID NO: 4, and wherein said contiguous nucleotides comprise at least one CpG dinucleotide sequence; and
(b) detecting the presence or absence of CpG methylation within the target region.

22. The method of claim 21, wherein the genomic tumor DNA comprises DNA from lung, prostate or breast carcinoma.

23. The method of claim 21, comprising:
(a) extracting or otherwise isolating genomic tumor DNA from a biological sample obtained from the subject;
(b) treating the genomic tumor DNA of (a), or a fragment thereof, with one or more reagents to convert cytosine bases that are unmethylated in the 5-position thereof to uracil or to another base that is detectably dissimilar to cytosine in terms of hybridization properties;
(c) contacting the treated genomic tumor DNA, or the treated fragment thereof, with an amplification enzyme and at least one primer comprising, a contiguous sequence of at least 9 nucleotides that is complementary to, or hybridizes under moderately stringent or stringent conditions to a sequence selected from the group consisting of SEQ ID NOs: 19, 20, 43 and 44, and complements thereof, wherein the treated genomic tumor DNA or the fragment thereof is either amplified to produce at least one amplificate, or is not amplified; and
(d) detecting the methylation state or level of at least one CpG dinucleotide of a sequence selected from the group consisting of SEQ ID NOs: 19, 20, 43 and 44, or an average, or a value reflecting an average methylation state or level of a plurality of CpG dinucleotides of SEQ ID NOs: 19, 20, 43 and 44.

24. The method of claim 21, wherein treating the genomic tumor DNA, or the fragment thereof comprises use of a reagent selected from the group comprising of bisulfite, hydrogen sulfite, disulfite, and combinations thereof.

25. The method of claim 21, wherein the biological sample obtained from the subject is selected from the group consisting of: cells, cell lines, histological slides, biopsies, paraffin-embedded tissue, body fluids, ejaculate, urine, blood plasma, blood serum, whole blood, isolated blood cells, sputum, biological matter derived from bronchoscopy, bronchial lavage, bronchial alveolar lavage, bronchial brushing, bronchial abrasion, and combinations thereof.

26. The method of claim 21, comprising:
(a) extracting or otherwise isolating genomic tumor DNA from a biological sample obtained from the subject;
(b) digesting the genomic tumor DNA, or a fragment thereof, with one or more methylation sensitive restriction enzymes;
(c) contacting the DNA restriction enzyme digest of (b) with an amplification enzyme and at least two primers suitable for the amplification of a sequence comprising at least one CpG dinucleotide of SEQ ID NO: 4; and
(d) detecting the methylation state or level of at least one CpG dinucleotide of SEQ ID NO: 4, by detecting the presence or absence of an amplificate.

27. A nucleic acid comprising at least 16 contiguous nucleotides of a treated genomic DNA sequence selected from the group consisting of SEQ ID NOs: 19, 20, 43 and 44, and sequences complementary thereto.

28. A nucleic acid comprising at least 50 contiguous nucleotides of a DNA sequence selected from the group consisting of SEQ ID NOs: 19, 20, 43 and 44, and sequences complementary thereto.

29. The nucleic acid of claim 27 wherein the contiguous base sequence comprises at least one CpG, TpG or CpA dinucleotide sequence.

30. A nucleic acid comprising at least 16 contiguous nucleotides of a treated genomic DNA sequence selected from the group consisting of SEQ ID NOs: 19, 20, 43 and 44 and sequences complementary thereto as a diagnostic means.

31. A kit suitable for performing the method of claim 30 comprising:
(a) a bisulfite reagent;
(b) a container suitable for containing the said bisulfite reagent and the biological sample of the subject; and
(c) at least one set of oligonucleotides containing two oligonucleotides whose sequences in each case are identical, are complementary, or hybridize under stringent or highly stringent conditions to segment of a sequence selected from SEQ ID NOs: 19, 20, 43 and 44, wherein the segment is between 9 and 18 nucleotides in length.
